(19) United States
(12) Patent Application Publication
(10) Pub. No.: US 2026/0085317 A1
(43) Pub. Date: Mar. 26, 2026

(54) SIRNA FOR TARGETED INHIBITION OF AGT GENE EXPRESSION AND USE THEREOF IN TREATING HYPERTENSION

(71) Applicant: Hangzhou Tianlong Pharmaceutical Co., Ltd., Hangzhou (CN)

(72) Inventors: Gengshen Song, Hangzhou (CN); Zeao Huang, Hangzhou (CN); Shuo Yang, Hangzhou (CN); Guangshen Ji, Hangzhou (CN); Zhikang Tian, Hangzhou (CN); Yucheng Wu, Hangzhou (CN); Zhongcai Gao, Hangzhou (CN); Wei Zhang, Hangzhou (CN); Man Zhang, Hangzhou (CN)

(21) Appl. No.: 19/341,325

(22) Filed: Sep. 26, 2025

(30) Foreign Application Priority Data
Sep. 26, 2024 (CN) 202411357089.7

(51) Int. Cl. C12N 15/113; A61K 31/7115; A61K 31/712; A61K 31/7125; A61K 31/713; A61P 9/12

(52) U.S. Cl. CPC C12N 15/113; A61K 31/7115; A61K 31/712; A61K 31/7125; A61K 31/713; A61P 9/12; C12N 2310/11; C12N 2310/14; C12N 2310/3125; C12N 2310/315; C12N 2310/321; C12N 2310/322; C12N 2310/335; C12N 2310/336; C12N 2310/351

(57) ABSTRACT

The present disclosure provides a modified oligonucleotide sequence and use thereof. A series of siRNAs were designed based on the angiotensinogen (AGT) messenger ribonucleic acid (mRNA) sequence, which were alternately modified or modified using a specific set of modification templates. The results from cell and animal experiments demonstrated that some oligonucleotide sequences with alternating modifications and specific template modifications can significantly inhibit AGT gene expression and may be used for the development of medicaments for treating hypertension and other related diseases.

### CROSS REFERENCE TO RELATED APPLICATIONS

[0001] This application claims priority from Chinese patent application CN202411357089.7, filed on Sep. 26, 2024, the entire contents of which are hereby incorporated by reference.

### REFERENCE TO SEQUENCE LISTING

[0002] The instant application contains a Sequence Listing as an XML file entitled “P25432973US-SEQ” created on Sep. 24, 2025 and having a size of 4,774,287 bytes. The Sequence Listing is incorporated herein by reference.

### TECHNICAL FIELD

[0003] The present disclosure belongs to the technical field of nucleic acid modification, and specifically relates to a small interfering ribonucleic acid (siRNA) modified by various chemical methods and use thereof in the manufacture of a medicament for treating a disease associated with AGT gene expression, e.g., an siRNA for targeted inhibition of AGT gene expression and use thereof in treating hypertension.

### BACKGROUND

[0004] Nucleic acid drugs, particularly oligonucleotide drugs, have been widely used due to their simple synthesis and high activity. Oligonucleotide drugs typically include antisense oligonucleotides (ASOs), small interfering RNAs (siRNAs), microRNAs (miRNAs), and aptamers.

[0005] Oligonucleotides are short DNA or RNA molecules or oligomers that readily bind, in a sequence-specific manner, to their respective complementary oligonucleotides, DNA, or RNA to form duplexes or, less commonly, hybrids of a higher order. The fundamental property enables oligonucleotides to have broad applications in genetic testing, research, and medicine. In nature, oligonucleotides are typically small RNA molecules involved in regulating gene expression or intermediates derived from the degradation of larger nucleic acid molecules.

[0006] RNA interference (RNAi) is a natural defense mechanism against exogenous genes. siRNA can knock out the target gene by recognizing a specific sequence and degrading the target mRNA.

[0007] The effective molecule of classical RNAi consists of a hallmark polymer structure of 19±2 nucleotides (a double-helix structure consisting of a 21-nucleotide RNA molecule and a 19-nucleotide molecule with corresponding nucleobases, containing a 2-nucleotide 3′ overhang). One strand of the siRNA (the guide strand or antisense strand) is complementary to the mRNA transcript of the target gene, while the other strand is designated as the passenger strand (sense strand). The siRNA (antisense strand) guides the Argonaute protein (AGO2) to complement the target transcript and becomes part of the RNA-induced silencing complex (RISC). The complete complementarity between the siRNA (antisense strand) and the target leads to cleavage of the target transcript at the opposite position of the guide strand (antisense strand) at positions 10 to 11 catalyzed by the AGO2 protein.

[0008] siRNA has inherent advantages over small molecule and antibody drugs because siRNA executes its function through Watson-Crick base pairing with mRNA, whereas small molecule and monoclonal antibody drugs require recognition of the complicated spatial conformation of specific proteins. As a result, there are many diseases that are not treatable by small molecules or monoclonal antibodies due to the high activity of their target molecules and the inability to recognize molecular structures with affinity and binding specificity thereto. The mechanism of action of siRNA drugs allows them to regulate the expression of target proteins at the genetic level, offering targeting specificity compared to small molecule or antibody drugs. The mechanism based on the principle of complementary base pairing also makes siRNA therapies broader in scope, simpler in design, and shorter in development cycles.

[0009] Oligonucleotides can bind sequence-specifically to complementary RNA strands and, upon hybridization, can induce RNase H cleavage of the target RNA. In natural oligonucleotides, nucleotides are linked by phosphodiester bonds, making them particularly susceptible to nucleases under physiological conditions. Thus, natural, unstructured, and unmodified oligonucleotide drugs are easily and rapidly degraded by nucleases in vivo, exhibiting low activity and poor druggability. Chemical modification of oligonucleotide structures is an effective approach to enhance their activity, which can improve their stability to nucleases and affinity for RNA, and better facilitate endocytosis and tissue targeting, thereby effectively regulating the expression of target genes.

[0010] Based on the fundamental structure of oligonucleotides, i.e., bases, sugar rings, phosphate backbones, and termini, chemical modifications can be divided into four parts:
[0011] 1) Base modifications: primarily categorized into purine modifications, pyrimidine modifications, and base substitutions. Purine modifications include N6-methyladenosine, Ni-methyladenosine, and 7-methylguanosine modifications; pyrimidine modifications include 3-methyluridine, 5-methyluridine, 5-methylcytidine, N4-acetylcytidine, pseudouridine, thiouridine, propynyluridine, and dihydrouridine modifications.
[0012] 2) Sugar ring modifications: primarily categorized into sugar ring modifications and substitutions. Sugar ring modifications include 2′-modifications, 4′-modifications, 5′-modifications, isomer modifications, and combinations thereof. The most common 2′-modifications of siRNA are 2′-OMe (2′-O-methyl) and 2′-F (2′-fluoro) modifications. Compared to natural siRNAs, siRNAs modified with both 2′-OMe and 2′-F exhibit higher Tm values, stronger serum stability, and better activity.
[0013] 3) Phosphate backbone modifications: primary modification methods include phosphorothioate modifications; modifications with methylphosphonate, selenophosphate, boranophosphate, dithiophosphate, and substitution of the bridging oxygen atom in the phosphodiester linkage with a sulfur atom; and substitution of the entire phosphate group between nucleosides with a non-phosphorus group, such as substitution of the P atom with a C, S, or N atom to form guanidinyl, S-methylthiourea, etc.
[0014] 4) Terminal modifications: covalent conjugation of special groups at the 5′ or/and 3′ end of the sense strand and phosphorylation modification at the 5′ end of the antisense strand.

[0015] Hypertension is a systemic disease characterized primarily by elevated blood pressure, with high prevalence but low treatment and control rates.

[0016] Angiotensinogen (AGT) protein is a secreted protein predominantly expressed in the liver in humans. AGT is also expressed in the brain, gallbladder, heart, kidney, and other tissues. AGT protein is cleaved by renin to generate angiotensin I (Ang I), which is subsequently cleaved by angiotensin-converting enzyme (ACE) to generate physiologically active angiotensin II (Ang II). Ang II binds to angiotensin receptors (ATR), triggering vasoconstriction and elevating blood pressure.

[0017] Although numerous antihypertensive medications are currently available for the treatment of hypertension, over two-thirds of patients struggle to control their blood pressure with one medication and require two or more medications to control their blood pressure, which leads to reduced therapy adherence, increased potential side effects, and compromised therapeutic outcomes. Thus, there is a need in the art for alternative and combination therapies for patients suffering from angiotensinogen-related diseases.

### SUMMARY

[0018] The present disclosure relates to a double-stranded siRNA drug conjugated to N-acetylgalactosamine (GalNAc). Upon entering the bloodstream, GalNAc can bind to the asialoglycoprotein receptor (ASGPR) on the surface of hepatocytes, after which the drug is internalized into the cells and stored in endosomal structures. After being released from endosomes or lysosomes into the cytoplasm, the drug binds to the RNA-induced silencing complex (RISC) and, mediated by the antisense strand, binds to the mRNA transcribed from the AGT gene, inducing mRNA degradation and thereby inhibiting translation of AGT protein. Inhibition of the expression of AGT protein, as an upstream protein in the renin-angiotensin-aldosterone system (RAAS), will fundamentally inhibit the blood pressure-elevating effect of the RAAS system, thereby reducing blood pressure.

[0019] The present disclosure designs a series of unique siRNA sequences by targeting AGT mRNA sequences, followed by incorporating alternating modifications and specific template modifications.

[0020] Typically, siRNA employs 2′-O-methyl (2′-OMe) and 2′-fluoro (2′-F) modifications for monomers. However, even considering only the combination of these two monomer modifications, for siRNA, the sense and antisense strands collectively comprise 44 bases, resulting in 2⁴⁴ possible combinations. Furthermore, with the addition of different terminal phosphorothioate modification patterns, the number of possible modification schemes becomes more extensive.

[0021] The same siRNA sequence with different modification patterns exhibits significant differences in activity, while different siRNA sequences with the same modification pattern also exhibit significant differences in activity. Although some modification principles exist for siRNA modification design, previous studies have shown that it is impossible to accurately predict the activity based on the modification pattern, meaning that there is no definitive relationship between modification pattern and activity. Therefore, screening for highly active modification schemes from a myriad of possible modification combinations is extremely challenging.

[0022] The present disclosure screens out a number of sequences with alternating modifications and special modifications that significantly inhibit AGT gene expression by chemically modifying the designed siRNA sequences.

[0023] In one aspect, the present disclosure provides a double-stranded RNAi agent comprising an oligonucleotide duplex formed by pairing of a sense strand and an antisense strand.

[0024] In another aspect, the present disclosure provides a conjugate for reducing the expression of AGT, comprising the double-stranded RNAi agent described above and a ligand conjugated thereto.

[0025] In another aspect, the present disclosure provides a nucleic acid-protein composition comprising a duplex region of the double-stranded RNAi agent described above or an antisense strand of the duplex region, and a nuclease.

[0026] In another aspect, the present disclosure provides a recombinant vector comprising a nucleic acid molecule encoding the double-stranded RNAi agent described above.

[0027] In some embodiments, the vector backbone of the recombinant vector is selected from recombinant virus-derived circular RNA vectors, tRNA, rRNA scaffolds, and chimeric tRNA/pre-miRNA vectors.

[0028] In another aspect, the present disclosure provides a recombinant cell that synthesizes and secretes the double-stranded RNAi agent described above.

[0029] In some embodiments, the recombinant cell is selected from Thiocapsa roseopersicina and ribonuclease III-deficient Corynebacterium glutamicum.

[0030] In another aspect, the present disclosure provides a method for preparing a double-stranded RNAi agent, comprising culturing the recombinant cell described above or chemical synthesis.

[0031] In another aspect, the present disclosure provides a pharmaceutical composition comprising the double-stranded RNAi agent described above, the conjugate described above, or the nucleic acid-protein composition described above, and a pharmaceutically acceptable carrier.

[0032] In another aspect, the present disclosure provides a method for inhibiting AGT gene expression, comprising contacting the double-stranded RNAi agent described above, the conjugate described above, the nucleic acid-protein composition described above, or the pharmaceutical composition described above with a target cell.

[0033] In some embodiments, the method is for non-diagnostic or non-therapeutic purposes.

[0034] In some embodiments, the method is performed in vivo or in vitro.

[0035] In another aspect, the present disclosure provides a use of the double-stranded RNAi agent described above, the conjugate described above, the nucleic acid-protein composition described above, or the pharmaceutical composition described above in the manufacture of a medicament for treating a disease associated with AGT gene expression.

[0036] The disease associated with AGT gene expression is selected from diseases caused by overexpression of AGT protein, pathogenic mutations in the AGT gene, abnormal metabolism of AGT protein, and abnormal interaction between AGT and another substance.

[0037] In some embodiments, the disease associated with AGT gene expression is selected from hypertension, ocular hypertension, glaucoma, pulmonary hypertension, portal hypertension, systemic venous hypertension, hypertensive heart disease, atherosclerosis, arteriosclerosis, vascular disease, diabetic nephropathy, diabetic retinopathy, chronic heart failure, cardiomyopathy, diabetic cardiomyopathy, glomerulosclerosis, aortic coarctation, aortic aneurysm, ventricular fibrosis, Cushing's syndrome and other glucocorticoid excess states (including chronic steroid therapy), pheochromocytoma, reninoma, secondary hyperaldosteronism and other mineralocorticoid excess states, sleep apnea, thyroid/parathyroid diseases, heart failure, myocardial infarction, angina pectoris, stroke, diabetes, nephropathy (e.g., hypertensive nephropathy), renal failure, systemic sclerosis, intrauterine growth retardation (IUGR), and fetal growth restriction.

[0038] In another aspect, the present disclosure provides the double-stranded RNAi agent described above, the conjugate described above, the nucleic acid-protein composition described above, or the pharmaceutical composition described above for use in treating a disease associated with AGT gene expression.

[0039] In another aspect, the present disclosure provides a method for treating a disease associated with AGT gene expression, comprising administering to a subject in need thereof an effective amount of the double-stranded RNAi agent described above, the conjugate described above, the nucleic acid-protein composition described above, or the pharmaceutical composition described above.

[0040] In another aspect, the present disclosure provides a use of the double-stranded RNAi agent described above, the conjugate described above, the nucleic acid-protein composition described above, or the pharmaceutical composition described above in the manufacture of a medicament for treating hypertension and cardiovascular and cerebrovascular diseases.

[0041] In another aspect, the present disclosure provides the double-stranded RNAi agent described above, the conjugate described above, the nucleic acid-protein composition described above, or the pharmaceutical composition described above for use in treating hypertension and cardiovascular and cerebrovascular diseases.

[0042] In another aspect, the present disclosure provides a method for treating hypertension and cardiovascular and cerebrovascular diseases, comprising administering to a subject in need thereof an effective amount of the double-stranded RNAi agent described above, the conjugate described above, the nucleic acid-protein composition described above, or the pharmaceutical composition described above.

[0043] The beneficial effects achieved by the present disclosure include at least the following:
[0044] (1) The unmodified sequences, including unmodified sequences 1576s, 1578s, 1838, 1835, 1816, 1812, 1579, 1836, 1789, 1839, 1791, 1795, and 1585s, exhibit significant inhibitory effects on AGT, with an inhibition rate exceeding 50% at maximum.
[0045] (2) The multiply modified sequences exhibit an inhibition rate of up to 70% or higher. Moreover, the modified sequences conjugated with GalNAc compounds can be efficiently delivered to the liver in animals, significantly inhibiting AGT gene expression and significantly reducing blood pressure levels.
[0046] (3) The sequences modified by alternating modifications and the modification templates of the present disclosure all exhibit significantly enhanced AGT inhibitory activity compared to the unmodified sequences with minimal differences disclosed in the prior art, with a maximum increase of 91.0%.
[0047] (4) The present disclosure shows that siRNAs with similar sequences, whether unmodified sequences or alternately modified sequences, exhibit significant differences in activity. For example, the unmodified sequence 1812 exhibits a 14.3% increase in inhibition rate compared to the unmodified sequence 812P, while the alternately modified sequence B1812-AL exhibits a 20.4% increase in inhibition rate compared to the unmodified sequence 812P, indicating a significant improvement.
[0048] (5) The present disclosure also shows that the effect of alternating modifications on activity varies across different sequences. For some sequences, the inhibition rate is significantly improved, e.g., the unmodified sequence 836 exhibits a 13.3% increase in inhibition rate after alternating modification. For others, the improvement is minimal, e.g., the unmodified sequences 994, 1279, and 1591 exhibit virtually no difference in inhibition rate between alternately modified and unmodified sequences.

### BRIEF DESCRIPTION OF THE DRAWINGS

[0049] To more clearly illustrate the technical solutions of the embodiments of the present disclosure, the accompanying drawings of the embodiments will be briefly described below. It is apparent that the accompanying drawings in the following description relate only to some embodiments of the present disclosure and are not intended to limit the present disclosure.

[0050] FIG. 1 shows alternately modified sequences with significant inhibitory effects on the AGT gene, all exhibiting inhibition rates above 40%.

[0051] FIG. 2 shows alternately modified sequences with inhibition rates of 25% to 40% for the AGT gene.

[0052] FIG. 3 shows alternately modified sequences with inhibition rates below 25% for the AGT gene.

[0053] FIG. 4 shows unmodified sequences with significant inhibitory effects on the AGT gene, all exhibiting inhibition rates above 45%.

[0054] FIG. 5 shows unmodified sequences with inhibition rates below 45% for the AGT gene.

[0055] FIG. 6 shows the inhibition rates of unmodified sequence 1579 for the AGT gene after different template modifications, as well as the inhibition rate of sequence 579P disclosed in the prior art for the AGT gene.

[0056] FIG. 7 shows the inhibition rates of unmodified sequences 1578s and 1835 for the AGT gene after template modification and anti-off-target modification.

[0057] FIG. 8 shows the inhibition rates of unmodified sequences 1579, 1789, 1812, 1576s, 1578s, and 1585s for AGT protein in animal serum after different modification schemes and conjugation with GalNAc compounds.

[0058] FIG. 9 shows the inhibition rates of unmodified sequences 1579, 1789, 1812, 1576s, 1578s, and 1585s for AGT protein in animal serum at different time points after different modification schemes and conjugation with GalNAc compounds.

### DETAILED DESCRIPTION OF THE PREFERRED EMBODIMENT

[0059] To facilitate understanding of the present disclosure, certain terms are first defined. In addition, it should be noted that whenever a value or a range of values for a parameter is recited, it is intended that values and ranges intermediate to the recited values are also intended to be part of the present disclosure.

[0060] As used herein, the articles “a” and “an” refer to one or more than one (i.e., at least one) of the grammatical object of the article. Byway of example, “an element” means one element or more than one element, e.g., a plurality of elements.

[0061] The term “including” is used herein to mean, and is used interchangeably with, the phrase “including, but not limited to”.

[0062] The term “or” is used herein to mean, and is used interchangeably with, the term “and/or”, unless the context clearly indicates otherwise.

[0063] As used herein, the term “about” or “approximately”, as applied to one or more values of interest, refers to a value that is similar to a stated reference value. In certain embodiments, the term “approximately” or “about” refers to a range of values that fall within 20%, 19%, 18%, 17%, 16%, 15%, 14%, 13%, 12%, 11%, 10%, 9%, 8%, 7%, 6%, 5%, 4%, 3%, 2%, 1%, or less of the stated reference value in either direction (greater than or less than), unless otherwise specified or clearly evident from the context (except where such a number would exceed 100% of a possible value).

[0064] As used herein, “AGT” refers to the angiotensinogen gene or protein.

[0065] “G”, “C”, “A”, and “U” each generally represent a nucleotide containing guanine, cytosine, adenine, and uracil as a base, respectively. “T”, “Td”, and “dT” are used interchangeably herein and refer to a deoxyribonucleotide in which the nucleobase is thymine, such as deoxyribothymine, 2′-deoxythymidine, or thymidine. However, it should be understood that the term “ribonucleotide”, “nucleotide”, or “deoxyribonucleotide” may also refer to a modified nucleotide (as further detailed below) or a surrogate replacement moiety. Those skilled in the art will readily appreciate that guanine, cytosine, adenine, and uracil may be replaced by other moieties without substantially altering the base pairing properties of an oligonucleotide (including a nucleotide comprising such a replacement moiety). For example, without limitation, a nucleotide containing inosine as its base may base pair with a nucleotide containing adenine, cytosine, or uracil. Hence, nucleotides containing uracil, guanine, or adenine may be replaced in the nucleotide sequences of the present disclosure by a nucleotide containing, for example, inosine. Sequences comprising such replacement moieties are embodiments of the present disclosure.

[0066] The terms “iRNA”, “RNAi agent”, “iRNA agent”, and “RNA interference agent” are used interchangeably herein, and the defined terms encompass RNA agents that can mediate the targeted cleavage of a transcript via an RNA-induced silencing complex (RISC) pathway. iRNA directs the sequence-specific degradation of mRNA through a process known as RNA interference (RNAi). iRNA modulates, e.g., inhibits, the expression of AGT in cells such as those within a subject (e.g., a mammalian subject). RNAi molecules include single-stranded RNAi molecules (Lima et al., 2012, Cell 150:883) and double-stranded siRNAs, as well as short hairpin RNAs (shRNAs).

[0067] The term “small interfering ribonucleic acid” or “siRNA” refers to small interfering ribonucleic acid RNAi molecules. It is a class of double-stranded RNA molecules, also known in the art as short interfering RNA or silencing RNA. siRNA typically comprises a sense strand (also referred to as a passenger strand) and an antisense strand (also referred to as a guide strand), wherein each strand is 17 to 30 nucleotides in length, typically 19 to 25 nucleotides in length, wherein the antisense strand is complementary (e.g., at least 95% complementary, e.g., fully complementary) to the target nucleic acid (suitably a mature mRNA sequence), and the sense strand is complementary to the antisense strand, such that the sense and antisense strands form a duplex or duplex region. The siRNA strands may form a blunt-ended duplex, or preferably, the 3′ ends of the sense and antisense strands may form a 3′ overhang, e.g., 1, 2, or 3 nucleotides, to resemble the product produced by Dicer, which may form a RISC substrate in vivo. Effective extended forms of Dicer substrates have been described in U.S. Pat. Nos. 8,349,809 and 8,513,207, which are incorporated herein by reference. In some embodiments, both the sense strand and the antisense strand have a 2-nt 3′ overhang. Thus, the duplex region may be, e.g., 17 to 25 nucleotides in length, such as 21 to 23 nucleotides in length.

[0068] The term “antisense strand” refers to the strand of RNAi (e.g., dsRNA) which includes a region that is substantially complementary to a target sequence. As used herein, the term “region of complementarity” refers to a region on the antisense strand that is substantially complementary to a sequence (e.g., a target sequence) as defined herein. Where the region of complementarity is not fully complementary to the target sequence, the mismatches may be in the internal or terminal regions of the molecule. Typically, the most tolerated mismatches are in the terminal regions, e.g., within 5, 4, 3, or 2 nucleotides of the 5′ and/or 3′ ends.

[0069] As used herein, the term “sense strand” refers to the strand of RNAi which includes a region that is substantially complementary to a region of the antisense strand (as the term is defined herein).

[0070] The term “alternating modification” refers to a fully modified siRNA sequence employing alternating 2′-O-methyl (2′-OMe) and 2′-fluoro (2′-F) modifications. For the antisense strand of an siRNA sequence, 2′-O-methyl modifications are introduced at odd-numbered positions (i.e., positions 1, 3, 5, 7 . . . 21, 23), while 2′-fluoro modifications are introduced at even-numbered positions (i.e., positions 2, 4, 6, 8 . . . 20, 22). For the sense strand complementary to the antisense strand, at positions where 2′-O-methyl modifications are introduced on the antisense strand, 2′-fluoro modifications are introduced at complementary positions on the sense strand; at positions where 2′-fluoro modifications are introduced on the antisense strand, 2′-O-methyl modifications are introduced at complementary positions on the sense strand.

[0071] As used herein, the term “inhibiting” is used interchangeably with “reducing”, “silencing”, “downregulating”, “suppressing”, and other similar terms, and includes any level of inhibition.

[0072] As used herein, the phrase “inhibiting expression of AGT” includes inhibition of expression of any AGT gene (e.g., a mouse AGT gene, a rat AGT gene, a monkey AGT gene, or a human AGT gene) as well as variants (e.g., naturally occurring variants) or mutants of the AGT gene. Thus, the AGT gene may be a wild-type AGT gene, a mutant AGT gene, or a transgenic AGT gene in the context of genetically manipulated cells, cell populations, or organisms.

[0073] “Inhibiting AGT gene expression” includes any level of inhibition of the AGT gene, e.g., at least partial inhibition of AGT gene expression, such as inhibition of at least about 5%, at least about 10%, at least about 15%, at least about 20%, at least about 25%, at least about 30%, at least about 35%, at least about 40%, at least about 45%, at least about 50%, at least about 55%, at least about 60%, at least about 65%, at least about 70%, at least about 75%, at least about 80%, at least about 85%, at least about 90%, at least about 91%, at least about 92%, at least about 93%, at least about 94%, at least about 95%, at least about 96%, at least about 97%, at least about 98%, or at least about 99%.

[0074] AGT gene expression may be assessed based on the level of any variable associated with AGT gene expression, e.g., AGT mRNA levels or AGT protein levels. Inhibition may be assessed by a reduction in the absolute or relative level of one or more of these variables compared to a control level. The control level may be any type of control level utilized in the art, e.g., a pre-dose baseline level or a level determined from a similar subject, cell, or sample that is untreated or treated with a control (e.g., buffer-only control or inert agent control).

[0075] As used herein, a “patient” or “subject” is intended to include a human or non-human animal, preferably a mammal, e.g., a monkey. Most preferably, the subject or patient is a human.

[0076] As used herein, a “AGT-associated disease” is intended to include any disease associated with the AGT gene or protein. Such a disease may be caused, for example, by overproduction of the AGT protein, by mutations in the AGT gene, by abnormal cleavage of the AGT protein, or by abnormal interaction between AGT and other proteins or other endogenous or exogenous substances. Exemplary AGT-associated diseases include hypertension, borderline hypertension, primary hypertension, secondary hypertension, hypertensive crisis, hypertensive urgency, isolated systolic and diastolic hypertension, pregnancy-associated hypertension, diabetic hypertension, resistant hypertension, refractory hypertension, paroxysmal hypertension, renovascular hypertension, Goldblatt hypertension, ocular hypertension, glaucoma, pulmonary hypertension, portal hypertension, systemic venous hypertension, systolic hypertension, labile hypertension, hypertensive heart disease, hypertensive nephropathy, atherosclerosis, arteriosclerosis, vasculopathy, diabetic nephropathy, diabetic retinopathy, chronic heart failure, cardiomyopathy, diabetic cardiomyopathy, glomerulosclerosis, aortic coarctation, aortic aneurysm, ventricular fibrosis, Cushing's syndrome and other glucocorticoid excess states (including chronic steroid therapy), pheochromocytoma, reninoma, secondary hyperaldosteronism and other mineralocorticoid excess states, sleep apnea, thyroid/parathyroid diseases, heart failure, myocardial infarction, angina, stroke, diabetes, nephropathy, renal failure, systemic sclerosis, intrauterine growth retardation (IUGR), and fetal growth restriction.

[0077] As used herein, a “therapeutically effective amount” is intended to include an amount of an RNAi agent that, when administered to a patient for treating an AGT-associated disease, is sufficient to achieve treatment of the disease (e.g., by attenuating, ameliorating, or maintaining the existing disease or one or more symptoms of the disease). The “therapeutically effective amount” may vary depending on the RNAi agent, how the agent is administered, the disease and its severity, medical history, age, weight, family history, genetic makeup, stage of pathological processes mediated by the expression of AGT, type of prior or concomitant therapy (if any), and other individual characteristics of the patient to be treated.

[0078] As used herein, a “prophylactically effective amount” is intended to include an amount of an RNAi agent that, when administered to a subject who has not yet experienced or exhibited symptoms of an AGT-associated disease, but who may be susceptible to the disease, is sufficient to prevent or ameliorate the disease or one or more symptoms of the disease. Amelioration of the disease includes slowing the progression of the disease or reducing the severity of later-onset disease. The “prophylactically effective amount” may vary depending on the RNAi agent, how the agent is administered, degree of risk of the disease, medical history, age, weight, family history, genetic makeup, type of prior or concomitant therapy (if any), and other individual characteristics of the patient to be treated.

[0079] The “therapeutically effective amount” or “prophylactically effective amount” also includes an amount of an RNAi agent that produces a desired local or systemic effect at a reasonable benefit/risk ratio applicable to any treatment. The RNAi agent used in the methods of the present disclosure may be administered in an amount sufficient to achieve a reasonable benefit/risk ratio applicable to such treatment.

[0080] As used herein, the term “sample” includes a collection of similar fluids, cells, or tissues isolated from a subject, as well as fluids, cells, or tissues present in the subject. Examples of biological fluids include blood, serum and serous fluid, plasma, cerebrospinal fluid, ocular fluid, lymph, urine, saliva, etc. Tissue samples may include samples from tissues, organs, or localized regions. For example, samples may be derived from specific organs, parts of organs, or fluids or cells within these organs. In certain embodiments, samples may be derived from the liver (e.g., the entire liver or certain segments of the liver, or certain types of cells in the liver, such as hepatocytes). In preferred embodiments, a “sample derived from a subject” refers to blood or plasma drawn from the subject. In other embodiments, a “sample derived from a subject” refers to liver tissue (or subcomponents thereof) derived from the subject.

[0081] In one aspect, the present disclosure provides a double-stranded RNAi agent for reducing the expression of AGT, comprising any one oligonucleotide duplex selected from the following pairings of a sense strand and an antisense strand:
[0082] (1) the sense strand has the sequence shown in SEQ ID NO: 1 or a fragment thereof, or a modified sequence of the sequence or the fragment thereof; and the antisense strand has the sequence shown in SEQ ID NO: 14 or a fragment thereof, or a modified sequence of the sequence or the fragment thereof,
[0083] (2) the sense strand has the sequence shown in SEQ ID NO: 2 or a fragment thereof, or a modified sequence of the sequence or the fragment thereof; and the antisense strand has the sequence shown in SEQ ID NO: 15 or a fragment thereof, or a modified sequence of the sequence or the fragment thereof,
[0084] (3) the sense strand has the sequence shown in SEQ ID NO: 3 or a fragment thereof, or a modified sequence of the sequence or the fragment thereof, and the antisense strand has the sequence shown in SEQ ID NO: 16 or a fragment thereof, or a modified sequence of the sequence or the fragment thereof,
[0085] (4) the sense strand has the sequence shown in SEQ ID NO: 4 or a fragment thereof, or a modified sequence of the sequence or the fragment thereof; and the antisense strand has the sequence shown in SEQ ID NO: 17 or a fragment thereof, or a modified sequence of the sequence or the fragment thereof,
[0086] (5) the sense strand has the sequence shown in SEQ ID NO: 5 or a fragment thereof, or a modified sequence of the sequence or the fragment thereof; and the antisense strand has the sequence shown in SEQ ID NO: 18 or a fragment thereof, or a modified sequence of the sequence or the fragment thereof,
[0087] (6) the sense strand has the sequence shown in SEQ ID NO: 6 or a fragment thereof, or a modified sequence of the sequence or the fragment thereof; and the antisense strand has the sequence shown in SEQ ID NO: 19 or a fragment thereof, or a modified sequence of the sequence or the fragment thereof,
[0088] (7) the sense strand has the sequence shown in SEQ ID NO: 7 or a fragment thereof, or a modified sequence of the sequence or the fragment thereof, and the antisense strand has the sequence shown in SEQ ID NO: 20 or a fragment thereof, or a modified sequence of the sequence or the fragment thereof,
[0089] (8) the sense strand has the sequence shown in SEQ ID NO: 8 or a fragment thereof, or a modified sequence of the sequence or the fragment thereof; and the antisense strand has the sequence shown in SEQ ID NO: 21 or a fragment thereof, or a modified sequence of the sequence or the fragment thereof,
[0090] (9) the sense strand has the sequence shown in SEQ ID NO: 9 or a fragment thereof, or a modified sequence of the sequence or the fragment thereof; and the antisense strand has the sequence shown in SEQ ID NO: 22 or a fragment thereof, or a modified sequence of the sequence or the fragment thereof,
[0091] (10) the sense strand has the sequence shown in SEQ ID NO: 10 or a fragment thereof, or a modified sequence of the sequence or the fragment thereof, and the antisense strand has the sequence shown in SEQ ID NO: 23 or a fragment thereof, or a modified sequence of the sequence or the fragment thereof,
[0092] (11) the sense strand has the sequence shown in SEQ ID NO: 11 or a fragment thereof, or a modified sequence of the sequence or the fragment thereof, and the antisense strand has the sequence shown in SEQ ID NO: 24 or a fragment thereof, or a modified sequence of the sequence or the fragment thereof,
[0093] (12) the sense strand has the sequence shown in SEQ ID NO: 12 or a fragment thereof, or a modified sequence of the sequence or the fragment thereof, and the antisense strand has the sequence shown in SEQ ID NO: 25 or a fragment thereof, or a modified sequence of the sequence or the fragment thereof,
[0094] (13) the sense strand has the sequence shown in SEQ ID NO: 13 or a fragment thereof, or a modified sequence of the sequence or the fragment thereof, and the antisense strand has the sequence shown in SEQ ID NO: 26 or a fragment thereof, or a modified sequence of the sequence or the fragment thereof. In some embodiments, all nucleotides on the sense and antisense strands are modified nucleotides.

[0095] In some embodiments, the double-stranded RNAi agent is an RNAi agent for inhibiting AGT gene expression.

[0096] In some embodiments, the sense strand differs from any one of the sequences of SEQ ID NOs: 1 to 13 by 1 to 3 nucleotides.

[0097] In some embodiments, the antisense strand differs from any one of the sequences of SEQ ID NOs: 14 to 26 by 1 to 3 nucleotides.

[0098] In some embodiments, at least one of the modified nucleotides is selected from the group consisting of a deoxy-nucleotide, a 3′-deoxy-thymidine (dT) nucleotide, a 2′-O-methyl modified nucleotide, a 2′-fluoro modified nucleotide, a 2′-deoxy-modified nucleotide, a locked nucleotide, an unlocked nucleotide, a conformationally restricted nucleotide, a constrained ethyl nucleotide, an abasic nucleotide, a 2′-amino-modified nucleotide, a 2′-O-allyl-modified nucleotide, a 2′-C-alkyl-modified nucleotide, a 2′-hydroxy-modified nucleotide, a 2′-methoxyethyl modified nucleotide, a 2′-O-alkyl-modified nucleotide, a morpholino nucleotide, a phosphoramidate, a nucleotide comprising a non-natural base, a tetrahydropyran modified nucleotide, a 1,5-anhydrohexitol modified nucleotide, a cyclohexenyl modified nucleotide, a nucleotide comprising a phosphorothioate group, a nucleotide comprising a methylphosphonate group, a nucleotide comprising a 5′-phosphate group, and a nucleotide comprising a 5′-phosphate mimic.

[0099] In some embodiments, at least one strand comprises a 3′ overhang of at least 1 nucleotide.

[0100] In some embodiments, at least one strand comprises a 3′ overhang of at least 2 nucleotides.

[0101] In some embodiments, the duplex region is 15 to 30 nucleotide pairs in length.

[0102] In some embodiments, the duplex region is 17 to 25 nucleotide pairs in length.

[0103] In some embodiments, the duplex region is 19 to 23 nucleotide pairs in length.

[0104] In some embodiments, the duplex region is 21 nucleotide pairs in length.

[0105] In some embodiments, each strand has 15 to 30 nucleotides.

[0106] In some embodiments, each strand has 19 to 25 nucleotides.

[0107] In some embodiments, the sense strand has 21 nucleotides and the antisense strand has 23 nucleotides.

[0108] In some embodiments, all nucleotide modifications on the sense and antisense strands are chemical modifications at the 2′ position of the nucleotide ribose.

[0109] In some embodiments, the chemical modification at the 2′ position of the nucleotide ribose is selected from any one of 2′-O-methyl, 2′-methoxyethyl, 2′-fluoro, 2′-benzyloxy, 2′-methylcarbonylamino, and 2′-pyridinylmethoxy, or a combination thereof.

[0110] In some embodiments, the chemical modification at the 2′ position of each nucleotide ribose is selected from a combination of 2′-O-methyl and 2′-fluoro.

[0111] In some embodiments, the chemical modification at the 2′ position of each nucleotide ribose is selected from an alternating combination of 2′-O-methyl and 2′-fluoro.

[0112] In some embodiments, the chemical modification pattern at the 2′ position of each nucleotide ribose is as follows: on the sense strand, all odd-numbered positions are modified with 2′-fluoro, and all even-numbered positions are modified with 2′-O-methyl; on the antisense strand, all odd-numbered positions are modified with 2′-O-methyl, and all even-numbered positions are modified with 2′-fluoro.

[0113] In some embodiments, nucleotide monomers are linked by a 3′,5′-phosphodiester bond.

[0114] In some embodiments, the 3′,5′-phosphodiester bond between nucleotide monomers is phosphorothioate-modified.

[0115] In some embodiments, the aforementioned oligonucleotide comprises the following modifications: the antisense strand is modified according to one of the modification patterns shown in Table 42:

TABLE 42
Modification of antisense strand

| | Antisense strand (AS) 5′-3′ | | | | | | | | | | | |
|---|---|---|---|---|---|---|---|---|---|---|---|---|
| No. | 1 | 2 | 3 | 4 | 5 | 6 | 7 | 8 | 9 | 10 | 11 | 12 |
| A | 2′-OMe + | 2′-F + | 2′-OMe | 2′-OMe | 2′-OMe | 2′-F | 2′-OMe | 2′-OMe | 2′-OMe | 2′-OMe | 2′-OMe | 2′-OMe |
| | PS + EVP | PS | | | | | | | | | | |
| | 13 | 14 | 15 | 16 | 17 | 18 | 19 | 20 | 21 | 22 | 23 | |
| | 2′-OMe | 2′-F | 2′-OMe | 2′-F | 2′-OMe | 2′-OMe | 2′-OMe | 2′-OMe | 2′-OMe + PS | 2′-OMe + PS | 2′-OMe | |
| | 1 | 2 | 3 | 4 | 5 | 6 | 7 | 8 | 9 | 10 | 11 | 12 |
| B | 2′-OMe + | 2′-F + | 2′-F | 2′-F | 2′-OMe | 2′-F | 2′-OMe | 2′-OMe | 2′-OMe | 2′-OMe | 2′-OMe | 2′-OMe |
| | PS + EVP | PS | | | | | | | | | | |
| | 13 | 14 | 15 | 16 | 17 | 18 | 19 | 20 | 21 | 22 | 23 | |
| | 2′-OMe | 2′-F | 2′-OMe | 2′-F | 2′-OMe | 2′-OMe | 2′-OMe | 2′-OMe | 2′-OMe + | 2′-OMe + | 2′-OMe | |
| | | | | | | | | | PS | PS | | |
| | 1 | 2 | 3 | 4 | 5 | 6 | 7 | 8 | 9 | 10 | 11 | 12 |
| C | 2′-OMe + | 2′-F + | 2′-OMe | 2′-F | 2′-F | 2′-F | 2′-OMe | 2′-OMe | 2′-OMe | 2′-OMe | 2′-OMe | 2′-OMe |
| | PS + EVP | PS | | | | | | | | | | |
| | 13 | 14 | 15 | 16 | 17 | 18 | 19 | 20 | 21 | 22 | 23 | |
| | 2′-OMe | 2′-F | 2′-OMe | 2′-F | 2′-OMe | 2′-OMe | 2′-OMe | 2′-OMe | 2′-OMe + | 2′-OMe + | 2′-OMe | |
| | | | | | | | | | PS | PS | | |
| | 1 | 2 | 3 | 4 | 5 | 6 | 7 | 8 | 9 | 10 | 11 | 12 |
| D | 2′-OMe + | 2′-F + | 2′-OMe | 2′-OMe | 2′-F | 2′-F | 2′-OMe | 2′-OMe | 2′-OMe | 2′-OMe | 2′-OMe | 2′-OMe |
| | PS + EVP | PS | | | | | | | | | | |
| | 13 | 14 | 15 | 16 | 17 | 18 | 19 | 20 | 21 | 22 | 23 | |
| | 2′-OMe | 2′-F | 2′-OMe | 2′-F | 2′-OMe | 2′-OMe | 2′-OMe | 2′-OMe | 2′-OMe + | 2′-OMe + | 2′-OMe | |
| | | | | | | | | | PS | PS | | |
| | 1 | 2 | 3 | 4 | 5 | 6 | 7 | 8 | 9 | 10 | 11 | 12 |
| E | 2′-OMe + | 2′-F + | 2′-F | 2′-OMe | 2′-F | 2′-F | 2′-OMe | 2′-OMe | 2′-OMe | 2′-OMe | 2′-OMe | 2′-OMe |
| | PS + EVP | PS | | | | | | | | | | |
| | 13 | 14 | 15 | 16 | 17 | 18 | 19 | 20 | 21 | 22 | 23 | |
| | 2′-OMe | 2′-F | 2′-OMe | 2′-F | 2′-OMe | 2′-OMe | 2′-OMe | 2′-OMe | 2′-OMe + | 2′-OMe + | 2′-OMe | |
| | | | | | | | | | PS | PS | | |
| | 1 | 2 | 3 | 4 | 5 | 6 | 7 | 8 | 9 | 10 | 11 | 12 |
| F | 2′-OMe + | 2′-F + | 2′-F | 2′-OMe | 2′-OMe | 2′-F | 2′-OMe | 2′-OMe | 2′-OMe | 2′-OMe | 2′-OMe | 2′-OMe |
| | PS + EVP | PS | | | | | | | | | | |
| | 13 | 14 | 15 | 16 | 17 | 18 | 19 | 20 | 21 | 22 | 23 | |
| | 2′-OMe | 2′-F | 2′-OMe | 2′-F | 2′-OMe | 2′-OMe | 2′-OMe | 2′-OMe | 2′-OMe + | 2′-OMe + | 2′-OMe | |
| | | | | | | | | | PS | PS | | |

[0116] The sense strand is modified according to one of the modification patterns shown in Table 43:

TABLE 43
Modification of sense strand

| | Sense strand (SS) 5′-3′ | | | | | | | | | | |
|---|---|---|---|---|---|---|---|---|---|---|---|
| No. | 1 | 2 | 3 | 4 | 5 | 6 | 7 | 8 | 9 | 10 | 11 |
| a | 2′-OMe + PS | 2′-OMe + PS | 2′-OMe | 2′-OMe | 2′-OMe | 2′-OMe | 2′-F | 2′-OMe | 2′-F | 2′-F | 2′-F |
| | 12 | 13 | 14 | 15 | 16 | 17 | 18 | 19 | 20 | 21 | |
| | 2′-OMe | 2′-OMe | 2′-OMe | 2′-OMe | 2′-OMe | 2′-F | 2′-OMe | 2′-OMe | 2′-OMe | 2′-OMe | |
| | 1 | 2 | 3 | 4 | 5 | 6 | 7 | 8 | 9 | 10 | 11 |
| b | 2′-OMe + PS | 2′-OMe + PS | 2′-OMe | 2′-OMe | 2′-OMe | 2′-OMe | 2′-F | 2′-OMe | 2′-F | 2′-OMe | 2′-F |
| | 12 | 13 | 14 | 15 | 16 | 17 | 18 | 19 | 20 | 21 | |
| | 2′-OMe | 2′-OMe | 2′-OMe | 2′-OMe | 2′-OMe | 2′-F | 2′-OMe | 2′-OMe | 2′-OMe | 2′-OMe | |

[0117] In the above tables, 2′-OMe represents 2′-O-methyl; 2′-F represents 2′-fluoro; PS represents a phosphorothioate backbone;
[0118] wherein the antisense strand is modified according to modification pattern A, and the sense strand is modified according to modification pattern a;
[0119] wherein the antisense strand is modified according to modification pattern B, and the sense strand is modified according to modification pattern a;
[0120] wherein the antisense strand is modified according to modification pattern C, and the sense strand is modified according to modification pattern a;
[0121] wherein the antisense strand is modified according to modification pattern B, and the sense strand is modified according to modification pattern b;
[0122] wherein the antisense strand is modified according to modification pattern C, and the sense strand is modified according to modification pattern b;
[0123] wherein the antisense strand is modified according to modification pattern D, and the sense strand is modified according to modification pattern b;
[0124] wherein the antisense strand is modified according to modification pattern E, and the sense strand is modified according to modification pattern b;
[0125] wherein the antisense strand is modified according to modification pattern F, and the sense strand is modified according to modification pattern b.

[0126] In some embodiments, the aforementioned oligonucleotide comprises the following modifications: the antisense strand is modified according to one of the modification patterns shown in Table 44:

TABLE 44
Modification of antisense strand

| | Antisense strand (AS) 5′-3′ | | | | | | | | | | |
|---|---|---|---|---|---|---|---|---|---|---|---|
| No. | 1 | 2 | 3 | 4 | 5 | 6 | 7 | 8 | 9 | 10 | 11 |
| A | 2′-OMe + | 2′-F + | 2′-OMe | 2′-OMe | 2′-OMe | 2′-F | 2′-OMe | 2′-OMe | 2′-OMe | 2′-OMe | 2′-OMe |
| | PS + EVP | PS | | | | | | | | | |
| | 12 | 13 | 14 | 15 | 16 | 17 | 18 | 19 | 20 | 21 | 22 |
| | 2′-OMe | 2′-OMe | 2′-F | 2′-OMe | 2′-F | 2′-OMe | 2′-OMe | 2′-OMe | 2′-OMe + | 2′-OMe + | 2′-OMe |
| | | | | | | | | | PS | PS | |
| | 1 | 2 | 3 | 4 | 5 | 6 | 7 | 8 | 9 | 10 | 11 |
| B | 2′-OMe + | 2′-F + | 2′-F | 2′-F | 2′-OMe | 2′-F | 2′-OMe | 2′-OMe | 2′-OMe | 2′-OMe | 2′-OMe |
| | PS + EVP | PS | | | | | | | | | |
| | 12 | 13 | 14 | 15 | 16 | 17 | 18 | 19 | 20 | 21 | 22 |
| | 2′-OMe | 2′-OMe | 2′-F | 2′-OMe | 2′-F | 2′-OMe | 2′-OMe | 2′-OMe | 2′-OMe + | 2′-OMe + | 2′-OMe |
| | | | | | | | | | PS | PS | |
| | 1 | 2 | 3 | 4 | 5 | 6 | 7 | 8 | 9 | 10 | 11 |
| C | 2′-OMe + | 2′-F + | 2′-OMe | 2′-F | 2′-F | 2′-F | 2′-OMe | 2′-OMe | 2′-OMe | 2′-OMe | 2′-OMe |
| | PS + EVP | PS | | | | | | | | | |
| | 12 | 13 | 14 | 15 | 16 | 17 | 18 | 19 | 20 | 21 | 22 |
| | 2′-OMe | 2′-OMe | 2′-F | 2′-OMe | 2′-F | 2′-OMe | 2′-OMe | 2′-OMe | 2′-OMe + | 2′-OMe + | 2′-OMe |
| | | | | | | | | | PS | PS | |
| | 1 | 2 | 3 | 4 | 5 | 6 | 7 | 8 | 9 | 10 | 11 |
| D | 2′-OMe + | 2′-F + | 2′-OMe | 2′-OMe | 2′-F | 2′-F | 2′-OMe | 2′-OMe | 2′-OMe | 2′-OMe | 2′-OMe |
| | PS + EVP | PS | | | | | | | | | |
| | 12 | 13 | 14 | 15 | 16 | 17 | 18 | 19 | 20 | 21 | 22 |
| | 2′-OMe | 2′-OMe | 2′-F | 2′-OMe | 2′-F | 2′-OMe | 2′-OMe | 2′-OMe | 2′-OMe + | 2′-OMe + | 2′-OMe |
| | | | | | | | | | PS | PS | |
| | 1 | 2 | 3 | 4 | 5 | 6 | 7 | 8 | 9 | 10 | 11 |
| E | 2′-OMe + | 2′-F + | 2′-F | 2′-OMe | 2′-F | 2′-F | 2′-OMe | 2′-OMe | 2′-OMe | 2′-OMe | 2′-OMe |
| | PS + EVP | PS | | | | | | | | | |
| | 12 | 13 | 14 | 15 | 16 | 17 | 18 | 19 | 20 | 21 | 22 |
| | 2′-OMe | 2′-OMe | 2′-F | 2′-OMe | 2′-F | 2′-OMe | 2′-OMe | 2′-OMe | 2′-OMe + | 2′-OMe + | 2′-OMe |
| | | | | | | | | | PS | PS | |
| | 1 | 2 | 3 | 4 | 5 | 6 | 7 | 8 | 9 | 10 | 11 |
| F | 2′-OMe + | 2′-F + | 2′-F | 2′-OMe | 2′-OMe | 2′-F | 2′-OMe | 2′-OMe | 2′-OMe | 2′-OMe | 2′-OMe |
| | PS + EVP | PS | | | | | | | | | |
| | 12 | 13 | 14 | 15 | 16 | 17 | 18 | 19 | 20 | 21 | 22 |
| | 2′-OMe | 2′-OMe | 2′-F | 2′-OMe | 2′-F | 2′-OMe | 2′-OMe | 2′-OMe | 2′-OMe + | 2′-OMe + | 2′-OMe |
| | | | | | | | | | PS | PS | |

[0127] The sense strand is modified according to one of the modification patterns shown in Table 45:

TABLE 45
Modification of sense strand

| | Sense strand (SS) 5′-3′ | | | | | | | | | |
|---|---|---|---|---|---|---|---|---|---|---|
| No. | 1 | 2 | 3 | 4 | 5 | 6 | 7 | 8 | 9 | 10 |
| a | 2′-OMe + PS | 2′-OMe + PS | 2′-OMe | 2′-OMe | 2′-OMe | 2′-F | 2′-OMe | 2′-F | 2′-F | 2′-F |
| | 11 | 12 | 13 | 14 | 15 | 16 | 17 | 18 | 19 | 20 |
| | 2′-OMe | 2′-OMe | 2′-OMe | 2′-OMe | 2′-OMe | 2′-F | 2′-OMe | 2′-OMe | 2′-OMe | 2′-OMe |
| | 1 | 2 | 3 | 4 | 5 | 6 | 7 | 8 | 9 | 10 |
| b | 2′-OMe + PS | 2′-OMe + PS | 2′-OMe | 2′-OMe | 2′-OMe | 2′-F | 2′-OMe | 2′-F | 2′-OMe | 2′-F |
| | 11 | 12 | 13 | 14 | 15 | 16 | 17 | 18 | 19 | 20 |
| | 2′-OMe | 2′-OMe | 2′-OMe | 2′-OMe | 2′-OMe | 2′-F | 2′-OMe | 2′-OMe | 2′-OMe | 2′-OMe |

[0128] In the above tables, 2′-OMe represents 2′-O-methyl; 2′-F represents 2′-fluoro; PS represents a phosphorothioate backbone;
[0129] wherein the antisense strand is modified according to modification pattern A, and the sense strand is modified according to modification pattern a;
[0130] wherein the antisense strand is modified according to modification pattern B, and the sense strand is modified according to modification pattern a;
[0131] wherein the antisense strand is modified according to modification pattern C, and the sense strand is modified according to modification pattern a;
[0132] wherein the antisense strand is modified according to modification pattern B, and the sense strand is modified according to modification pattern b;
[0133] wherein the antisense strand is modified according to modification pattern C, and the sense strand is modified according to modification pattern b;
[0134] wherein the antisense strand is modified according to modification pattern D, and the sense strand is modified according to modification pattern b;
[0135] wherein the antisense strand is modified according to modification pattern E, and the sense strand is modified according to modification pattern b;
[0136] wherein the antisense strand is modified according to modification pattern F, and the sense strand is modified according to modification pattern b.

[0137] In some embodiments, the antisense strand comprises a modification group at positions 2 to 8 from the 5′ end, wherein the modification group is selected from UNA, GNA, or DNA, wherein the structures of UNA and GNA are as follows:

[chemical structure]

[0138] wherein the base is selected from adenine, guanine, cytosine, thymine, and uracil.

[0139] In some embodiments, the phosphorylation of the 5′-carbon atom of the 5′-terminal nucleotide glycoside of a modified antisense strand includes, but is not limited to, the following 5′-phosphorylation groups: 5′-vinylphosphonate group (5′-E-VP); 5′-methylphosphonate group (5′-MP); 5′-C-methylphosphate group; 5′-phosphorothioate group (5′-PS); 5′-phosphate group (5′-P), the structures of which are as follows:

[chemical structure]

[0140] wherein R is hydrogen, hydroxyl, amino, C₁₋₄ alkyl, aryl, C₁₋₄ alkoxy, C₁₋₄ alkylcarbonylamino, or halogen;
[0141] the base is selected from adenine, guanine, cytosine, thymine, and uracil.

[0142] In some embodiments, the 3′,5′-phosphodiester bond between nucleotide monomers at the terminus of the sequence is phosphorothioate-modified to form a chirally pure 3′,5′-phosphorothioate bond, wherein the 5′ ends of both the sense and antisense strands contain 1 to 3 phosphorothioate linkages, and the 3′ end of the antisense strand contains 1 to 3 phosphorothioate linkages.

[0143] The double-stranded RNA (dsRNA) agent of the present disclosure may optionally be conjugated to one or more ligands. The ligand may be attached to a sense strand, an antisense strand, or both strands at the 3′ end, the 5′ end, or both ends. For example, the ligand may be conjugated to the sense strand. In a preferred example, the ligand is attached to the 3′ end of the sense strand. In a preferred example, the ligand is a GalNAc ligand.

[0144] The present disclosure provides a conjugate for reducing the expression of AGT, comprising the double-stranded RNAi agent and a ligand conjugated thereto.

[0145] In some embodiments, the ligand is conjugated to the 3′ end or the 5′ end of the sense strand of the oligonucleotide.

[0146] In some embodiments, the ligand is one or more GalNAc derivatives attached via a bivalent or trivalent branched linker.

[0147] In some embodiments, the ligand is as follows:

[chemical structure]

[0148] wherein X is hydrogen, a hydroxyl protecting group, or H, the hydroxyl protecting group including acetyl, benzoyl, or isobutyryl; Y is an amino protecting group or H, the amino protecting group being formyl, acetyl, propionyl, n-butyryl, or isobutyryl; n is an integer from 0 to 20; q, r, and s are independently integers from 1 to 7.

[0149] In some embodiments, the ligand is as follows:

[chemical structure]

[0150] In some embodiments, the ligand is as follows:

[chemical structure]

[0151] wherein X is oxygen, nitrogen, or sulfur;
[0152] Y is alkyl or aryl;
[0153] R₁ is oxygen or sulfur;
[0154] R₂ is hydrogen, amino, C₁₋₄ alkyl, aryl, C₁₋₄ alkoxy, or halogen;

[0155] A is —(CH₂)ₐ—, —(CH₂CH₂O)_{b}—, —((CH₂)_{c}NHCO)_{d}—, or —((CH₂)_{c}CONH)_{d}—, wherein a is an integer from 1 to 15, b is an integer from 1 to 7, c is an integer from 1 to 7, and d is an integer from 1 to 5;
[0156] B is —(CH₂)ₑ—, wherein e is an integer from 0 to 7;
[0157] L is —CONH— or —NHCO—;
[0158] X₁ is —(CH₂)_{f}— or —(CH₂CH₂O)ₜCH₂—, wherein f is an integer from 1 to 5;
[0159] X₂ is —(CH₂)_{g}—, wherein g is an integer from 1 to 6;
[0160] Y₁ is 0 or 1;
[0161] Y₂ is 0, 1, or 2;
[0162] Y₃ is 1, 2, or 3;
[0163] m is an integer from 0 to 4;
[0164] n is an integer from 0 to 4.

[0165] In some embodiments, the ligand is G4, G5, G6, or G7:

[chemical structure]

[0166] In some embodiments, the conjugate has a structure as shown below:

[chemical structure]

[0167] In some embodiments, the double-stranded RNAi agent comprises any one oligonucleotide duplex selected from the following pairings of a sense strand and an antisense strand:
[0168] (1) the sense strand has the sequence shown in SEQ ID NO: 423; and the antisense strand has the sequence shown in SEQ ID NO: 488;
[0169] (2) the sense strand has the sequence shown in SEQ ID NO: 406; and the antisense strand has the sequence shown in SEQ ID NO: 453;
[0170] (3) the sense strand has the sequence shown in SEQ ID NO: 404; and the antisense strand has the sequence shown in SEQ ID NO: 450;
[0171] (4) the sense strand has the sequence shown in SEQ ID NO: 426; and the antisense strand has the sequence shown in SEQ ID NO: 492;
[0172] (5) the sense strand has the sequence shown in SEQ ID NO: 412; and the antisense strand has the sequence shown in SEQ ID NO: 465;
[0173] (6) the sense strand has the sequence shown in SEQ ID NO: 412; and the antisense strand has the sequence shown in SEQ ID NO: 468;
[0174] (7) the sense strand has the sequence shown in SEQ ID NO: 421; and the antisense strand has the sequence shown in SEQ ID NO: 483;
[0175] (8) the sense strand has the sequence shown in SEQ ID NO: 417; and the antisense strand has the sequence shown in SEQ ID NO: 476;
[0176] (9) the sense strand has the sequence shown in SEQ ID NO: 419; and the antisense strand has the sequence shown in SEQ ID NO: 479;
[0177] (10) the sense strand has the sequence shown in SEQ ID NO: 401; and the antisense strand has the sequence shown in SEQ ID NO: 443;
[0178] (11) the sense strand has the sequence shown in SEQ ID NO: 398; and the antisense strand has the sequence shown in SEQ ID NO: 433;
[0179] (12) the sense strand has the sequence shown in SEQ ID NO: 429; and the antisense strand has the sequence shown in SEQ ID NO: 496;
[0180] (13) the sense strand has the sequence shown in SEQ ID NO: 414; and the antisense strand has the sequence shown in SEQ ID NO: 471;
[0181] wherein the oligonucleotide duplex is conjugated with ligand G4, G5, G6, or G7.

[0182] In some embodiments, the double-stranded RNAi agent comprises any one oligonucleotide duplex selected from the following pairings of a sense strand and an antisense strand:
[0183] (1) the sense strand has the sequence shown in SEQ ID NO: 423; and the antisense strand has the sequence shown in SEQ ID NO: 488;
[0184] (2) the sense strand has the sequence shown in SEQ ID NO: 423; and the antisense strand has the sequence shown in SEQ ID NO: 489;
[0185] (3) the sense strand has the sequence shown in SEQ ID NO: 424; and the antisense strand has the sequence shown in SEQ ID NO: 489;
[0186] (4) the sense strand has the sequence shown in SEQ ID NO: 424; and the antisense strand has the sequence shown in SEQ ID NO: 490;
[0187] (5) the sense strand has the sequence shown in SEQ ID NO: 424; and the antisense strand has the sequence shown in SEQ ID NO: 488;
[0188] wherein the oligonucleotide duplex is conjugated with ligand G4, G5, G6, or G7.

[0189] In some embodiments, the double-stranded RNAi agent comprises an oligonucleotide duplex formed by pairing of the sense strand shown in SEQ ID NO: 423 and the antisense strand shown in SEQ ID NO: 488, wherein the oligonucleotide duplex is conjugated with ligand G5.

[0190] The present disclosure also provides a pharmaceutical composition comprising the double-stranded RNAi agent or conjugate and a pharmaceutically acceptable carrier.

[0191] In one example, provided herein is a pharmaceutical composition comprising the iRNA as described herein and a pharmaceutically acceptable carrier. The iRNA-containing pharmaceutical composition may be used for treating a disease or disorder associated with the expression or activity of the AGT gene, such as hypertension. Such pharmaceutical compositions are formulated based on the mode of delivery. One example is a composition formulated for systemic administration via parenteral delivery, e.g., via subcutaneous injection (S.C.). Another example is a composition formulated for direct delivery into the brain parenchyma, e.g., via infusion into the brain, such as by continuous pump infusion.

[0192] The pharmaceutical composition comprising the RNAi agent of the present disclosure may be, for example, a solution with or without a buffer or a composition comprising a pharmaceutically acceptable carrier. Such compositions include, for example, aqueous or crystalline compositions, liposomal formulations, micellar formulations, emulsions, and gene therapy vectors.

[0193] In the methods of the present disclosure, the RNAi agent may be administered in a solution. A free RNAi agent may be administered in an unbuffered solution, e.g., in saline or in water. Alternatively, the free siRNA may also be administered in a suitable buffered solution. The buffered solution may comprise acetate, citrate, prolamin, carbonate, or phosphate, or any combination thereof. In a preferred example, the buffered solution is phosphate-buffered saline (PBS). The pH and osmolarity of the buffered solution comprising the iRNA agent may be adjusted such that it is suitable for administration to a subject.

[0194] In some examples, the buffered solution further comprises an agent for controlling the osmolarity of the solution, such that the osmolarity is maintained at a desired value, e.g., at the physiological value of human plasma. Solutes that may be added to the buffered solution to control the osmolarity include, but are not limited to, proteins, peptides, amino acids, non-metabolized polymers, vitamins, ions, sugars, metabolites, organic acids, lipids, or salts. In some examples, the agent for controlling the osmolarity of the solution is a salt. In certain examples, the agent for controlling the osmolarity of the solution is sodium chloride or potassium chloride.

[0195] The pharmaceutical composition of the present disclosure may be administered at a dose sufficient to inhibit AGT gene expression. Generally, suitable doses of the iRNA of the present disclosure range from about 0.001 to about 200.0 milligrams per kilogram body weight of the recipient per day, typically ranging from about 1 to 50 mg per kilogram body weight per day. For example, the RNAi agent (e.g., dsRNA) may be administered at about 0.01, 0.05, 0.1, 0.2, 0.3, 0.4, 0.5, 0.6, 0.7, 0.8, 0.9, 1, 1.1, 1.2, 1.3, 1.4, 1.5, 1.6, 1.7, 1.8, 1.9, 2, 2.1, 2.2, 2.3, 2.4, 2.5, 2.6, 2.7, 2.8, 2.9, 3, 3.1, 3.2, 3.3, 3.4, 3.5, 3.6, 3.7, 3.8, 3.9, 4, 4.1, 4.2, 4.3, 4.4, 4.5, 4.6, 4.7, 4.8, 4.9, 5, 5.1, 5.2, 5.3, 5.4, 5.5, 5.6, 5.7, 5.8, 5.9, 6, 6.1, 6.2, 6.3, 6.4, 6.5, 6.6, 6.7, 6.8, 6.9, 7, 7.1, 7.2, 7.3, 7.4, 7.5, 7.6, 7.7, 7.8, 7.9, 8, 8.1, 8.2, 8.3, 8.4, 8.5, 8.6, 8.7, 8.8, 8.9, 9, 9.1, 9.2, 9.3, 9.4, 9.5, 9.6, 9.7, 9.8, 9.9, 10, 10.5, 11, 11.5, 12, 12.5, 13, 13.5, 14, 14.5, 15, 15.5, 16, 16.5, 17, 17.5, 18, 18.5, 19, 19.5, 20, 20.5, 21, 21.5, 22, 22.5, 23, 23.5, 24, 24.5, 25, 25.5, 26, 26.5, 27, 27.5, 28, 28.5, 29, 29.5, 30, 31, 32, 33, 34, 34, 35, 36, 37, 38, 39, 40, 41, 42, 43, 44, 45, 46, 47, 48, 49, or about 50 mg/kg per single dose.

[0196] The pharmaceutical composition may be administered once daily, or multiple times at various intervals over 1 to 365 days, or the iRNA may be administered as two, three, or more sub-doses at appropriate intervals within a year, or even using continuous infusion or delivery via a controlled-release formulation. In such cases, the amount of iRNA contained in each sub-dose must be proportionally smaller in order to achieve the total daily dose. Dose units may also be compounded for delivery over several days, e.g., using a conventional sustained-release formulation that provides sustained release of the iRNA over a period of days. Sustained-release formulations are well known in the art and are particularly useful for delivering agents to specific sites, and thus may be used with the agents of the present disclosure. In this embodiment, the dose unit contains a corresponding plurality of daily doses.

[0197] In other embodiments, a single dose of the pharmaceutical composition may be long-lasting, such that subsequent doses are administered at intervals of no more than 3, 4, or 5 days, or no more than 1, 2, 3, or 4 weeks. In some embodiments of the present disclosure, a single dose of the pharmaceutical composition of the present disclosure is administered once weekly. In other embodiments of the present disclosure, a single dose of the pharmaceutical composition of the present disclosure is administered once every two months.

[0198] Those skilled in the art will appreciate that certain factors may influence the dose and timing required to effectively treat a subject, including, but not limited to, the severity of the disease or disorder, prior treatments, the general health and/or age of the subject, and other existing diseases. Furthermore, treating a subject with a therapeutically effective dose of the composition may involve a single treatment or a series of treatments. As described elsewhere herein, the effective dose and in vivo half-life for each iRNA encompassed by the present disclosure may be estimated using conventional methods or on the basis of in vivo testing using suitable animal models.

[0199] The pharmaceutical composition of the present disclosure may be administered in various ways depending upon whether local or systemic treatment is desired and upon the area to be treated. Administration may be topical (e.g., via a transdermal patch); pulmonary; e.g., via inhalation or insufflation of a powder or aerosol, including via a nebulizer; intratracheal; intranasal; epidermal and transdermal, oral, or parenteral. Parenteral administration includes intravenous, intraarterial, subcutaneous, intraperitoneal, or intramuscular injection or infusion; subdermal administration, e.g., via an implantable device; or intracranial administration, e.g., intraparenchymal, intrathecal, or intraventricular administration.

[0200] The iRNA for use in the compositions and methods of the present disclosure may be formulated for delivery in a membranous molecular assembly, e.g., a liposome or a micelle. As used herein, the term “liposome” refers to a vesicle composed of amphipathic lipids arranged in at least one bilayer (e.g., one bilayer or a plurality of bilayers). Liposomes include unilamellar or multilamellar vesicles having a membrane formed from a lipophilic material and an aqueous interior. The aqueous portion contains the iRNA composition. The lipophilic material isolates the aqueous interior from an aqueous exterior, which typically does not contain the iRNA composition (although in some examples, it may). Liposomes are useful for transferring and delivering active ingredients to sites of action. Because liposomal membranes are structurally similar to biological membranes, when liposomes are applied to a tissue, the bilayer of the liposome fuses with the bilayer of the cell membrane. As the fusion of the liposome with the cell proceeds, the internal aqueous contents, including the iRNA, are delivered into the cell, where the iRNA can specifically bind to a target RNA and can mediate RNAi. In some cases, these liposomes are also specifically targeted, e.g., to direct the iRNA to particular cell types.

[0201] A liposome containing an RNAi agent can be prepared by a variety of methods. In one example, a lipid component of the liposome is dissolved in a detergent such that micelles are formed with the lipid component. For example, the lipid component may be an amphipathic cationic lipid or a lipid conjugate. The detergent may have a high critical micelle concentration and may be nonionic. Exemplary detergents include cholate, CHAPS, octyl glucoside, deoxycholate, and lauroyl sarcosinate. The RNAi agent preparation is then added to the micelles comprising the lipid component. The cationic groups on the lipid interact with the RNAi agent and condense around the RNAi agent to form a liposome. After condensation, the detergent is removed, e.g., by dialysis, to obtain a liposomal preparation of the RNAi agent.

[0202] The iRNA, e.g., the dsRNA of the present disclosure, may be fully encapsulated in a lipid formulation (e.g., a lipid nanoparticle (LNP) or other nucleic acid-lipid particle).

[0203] As used herein, the term “LNP” refers to a stable nucleic acid-lipid particle. The LNP comprises a cationic lipid, a non-cationic lipid, and a lipid that prevents aggregation of the particle (e.g., a PEG-lipid conjugate). LNPs are extremely useful for synthetic applications, as they exhibit prolonged circulation lifetimes following intravenous (i.v.) injection and accumulate at distal sites (e.g., sites physically separated from the administration site).

[0204] In one example, the lipid-to-drug ratio (mass/mass ratio) (e.g., lipid-to-dsRNA ratio) ranges from about 1:1 to about 50:1, from about 1:1 to about 25:1, from about 3:1 to about 15:1, from about 4:1 to about 10:1, from about 5:1 to about 9:1, or from about 6:1 to about 9:1.

[0205] In some preferred embodiments, the lipid nanoparticle comprise a cationic lipid, a neutral lipid, a structured lipid, and a polymer-conjugated lipid.

[0206] In some preferred embodiments, the cationic lipid is a compound with the structure of formula (I), or an N-oxide, a solvate, a pharmaceutically acceptable salt, or a stereoisomer thereof, wherein G₁ is C₁₋₆ alkylene; G₂ is C₂₋₈ alkylene; G₃ is C₁₋₃ alkylene; L₁ is C₆₋₁₅ linear alkyl; L₂ is C₁₂₋₂₅ branched alkyl. For example, YK-009 with the structure of formula (I-I) (see patent CN114044741B).

[chemical structure]

[0207] In some preferred embodiments, the cationic lipid is a compound with the structure of formula (II), or an N-oxide, a solvate, a pharmaceutically acceptable salt, or a stereoisomer thereof, wherein G₁ is C₂₋₈ alkylene; G₂ is C₂₋₈ alkylene; L₁ is —C(O)O— or —OC(O)—; L₂ is —C(O)O— or —OC(O)—; R₁ is C₆₋₂₅ linear or branched alkyl; R₂ is C₆₋₂₅ linear or branched alkyl; G₃ is HO(CH₂)₂—or HO(CH₂)₃—; G₄ is HO(CH₂)₂— or HO(CH₂)₃—; L is (CH₂)₂—, —(CH₂)₃—, or —(CH₂)₄—. For example, YK-401 with the structure of formula (II-I) or YK-402 with the structure of formula (II-II) (see patent CN115784921B).

[chemical structure]

[0208] In some preferred embodiments, the cationic lipid is a compound with the structure of formula (III), or an N-oxide, a solvate, a pharmaceutically acceptable salt, or a stereoisomer thereof, wherein G₁ is C₁-6 alkylene; G₂ is C₂₋₈ alkylene; R₁ is C₆₋₂₀ linear or branched alkyl; R₂ is C₁₂₋₂₅ branched alkyl; G₃ is HO(CH₂)₂N(CH₃)(CH₂)₂—, HO(CH₂)₂N(CH₂CH₃)(CH₂)₂—, (HO(CH₂)₂)₂N(CH₂)₂—, CH₃O(CH₂)₂N(CH₃)(CH₂)₂—, (CH₃)₂N(CH₂)₃SC(O)O(CH₂)₂—, (CH₃)₂N(CH₂)₃SC(O)—, CH₃NH(CH₂)₂N(CH₃)(CH₂)₂—, or CH₃CH₂NH(CH₂)₂—. For example, YK-201 with the structure of formula (III-I) or YK-202 with the structure of formula (III-II) (see patent CN115677518B).

[chemical structure]

[0209] In some preferred embodiments, the cationic lipid is a compound with the structure of formula (IV), or an N-oxide, a solvate, a pharmaceutically acceptable salt, or a stereoisomer thereof, wherein G₁ is C₁₋₈ alkylene; G2 is C₂₋₈ alkylene; R₁ is C₆₋₂₅ linear or branched alkyl; R₂ is C₁₂₋₂₅ linear or branched alkyl; G₃ is HO(CH₂)₂N(R₃)CH₂CH(OH)CH₂—, wherein R₃ is —CH₃, —CH₂CH₃, or —CH₂CH₂OH. For example, YK-305 with the structure of formula (IV-I) or YK-310 with the structure of formula (IV-II) (see patent CN115745820B).

[chemical structure]

[0210] In some preferred embodiments, the cationic lipid is a compound with the structure of formula (V), or an N-oxide, a solvate, a pharmaceutically acceptable salt, or a stereoisomer thereof, wherein G¹ and G² are each independently unsubstituted C₆-C₁₀ alkylene; G³ is unsubstituted C₁-C₁₂ alkylene; R¹ and R² are each independently C₆-C₂₄ alkyl or C₆-C₂₄ alkenyl; R³ is OR⁵, N, —C(═O)OR⁴, —OC(═O)R⁴, or —NR⁵C(═O)R⁴; R⁴ is C₁-C₁₂ hydrocarbyl; and R⁵ is H or C₁-C₆ hydrocarbyl; for example, ALC0315 with the structure of formula (V-I) (see patent CN108368028B).

[chemical structure]

[0211] In some preferred embodiments, the cationic lipid is a compound with the structure of formula (VI), or an N-oxide, a solvate, a pharmaceutically acceptable salt, or a stereoisomer thereof, wherein R₄ is selected from —(CH₂)ₙQ and —(CH₂)ₙCHQR; Q is selected from the group consisting of —OR, —OH, —O(CH₂)ₙN(R)₂, —OC(O)R, —CX₃, —CN, —N(R)C(O)R, —N(H)C(O)R, —N(R)S(O)₂R, —N(H)S(O)₂R, —N(R)C(O)N(R)₂, —N(H)C(O)N(R)₂, —N(H)C(O)N(H)(R), —N(R)C(S)N(R)₂, —N(H)C(S)N(R)₂, —N(H)C(S)N(H)(R), —N(R)S(O)₂R₈, and heterocycle; n is 1, 2, or 3; for example, SM102 with the structure of formula (VI-I) (see patent CN110520409A).

[chemical structure]

[0212] In some preferred embodiments, the cationic lipid is a compound with the structure of formula (VII), or an N-oxide, a solvate, a pharmaceutically acceptable salt, or a stereoisomer thereof (see patent CN102625696B, DLIN-MC3-DMA),

[chemical structure]

[0213] In some more preferred embodiments, the cationic lipid comprises YK-009, YK-401, YK-305, ALC0315, SM102, and DLIN-MC3-DMA.

[0214] In some preferred embodiments, the molar ratio of the cationic lipid to the neutral lipid is 1:1 to 10:1.

[0215] In some preferred embodiments, the molar ratio of the cationic lipid to the structured lipid is 1:1 to 5:1.

[0216] In some preferred embodiments, the molar ratio of the cationic lipid, the neutral lipid, the structured lipid, and the polymer-conjugated lipid is (25 to 65):(5 to 25):(25 to 70):(0.5 to 5).

[0217] In some preferred embodiments, the molar ratio of the cationic lipid, the neutral lipid, the structured lipid, and the polymer-conjugated lipid is (25 to 65):(5 to 25):(25 to 45):(0.5 to 5).

[0218] In some more preferred embodiments, the molar ratio of the cationic lipid, the neutral lipid, the structured lipid, and the polymer-conjugated lipid is 50:10:38.5:1.5 or 49:10:39.5:1.5.

[0219] In some preferred embodiments, the neutral lipid includes one or more of phosphatidylcholine, phosphatidylethanolamine, sphingomyelin, ceramide, sterol, and derivatives thereof.

[0220] In some more preferred embodiments, the neutral lipid is selected from one or more of the following: 1,2-dilinoleoyl-sn-glycero-3-phosphocholine (DLPC), 1,2-dimyristoyl-sn-glycero-phosphocholine (DMPC), 1,2-dioleoyl-sn-glycero-3-phosphocholine (DOPC), 1,2-dipalmitoyl-sn-glycero-3-phosphocholine (DPPC), 1,2-distearoyl-sn-glycero-3-phosphocholine (DSPC), 1,2-diundecanoyl-sn-glycero-phosphocholine (DUPC), 1-palmitoyl-2-oleoyl-sn-glycero-3-phosphocholine (POPC), 1,2-di-O-octadecenyl-sn-glycero-3-phosphocholine (18:0 Diether PC), 1-oleoyl-2-cholesterylhemisuccinoyl-sn-glycero-3-phosphocholine (OChemsPC), 1-hexadecyl-sn-glycero-3-phosphocholine (C16 μLyso PC), 1,2-dilinolenoyl-sn-glycero-3-phosphocholine, 1,2-diarachidonoyl-sn-glycero-3-phosphocholine, 1,2-didocosahexaenoyl-sn-glycero-3-phosphocholine, 1,2-dioleoyl-sn-glycero-3-phosphoethanolamine (DOPE), 1,2-diphytanoyl-sn-glycero-3-phosphoethanolamine (ME 16.0 PE), 1,2-distearoyl-sn-glycero-3-phosphoethanolamine, 1,2-dilinoleoyl-sn-glycero-3-phosphoethanolamine, 1,2-dilinolenoyl-sn-glycero-3-phosphoethanolamine, 1,2-diarachidonoyl-sn-glycero-3-phosphoethanolamine, 1,2-didocosahexaenoyl-sn-glycero-3-phosphoethanolamine, 1,2-dioleoyl-sn-glycero-3-phospho-rac-(1-glycerol) sodium salt (DOPG), dipalmitoyl phosphatidylglycerol (DPPG), palmitoyl oleoyl phosphatidylethanolamine (POPE), distearoyl-phosphatidyl-ethanolamine (DSPE), dipalmitoyl phosphatidylethanolamine (DPPE), dimyristoyl phosphoethanolamine (DMPE), 1-stearoyl-2-oleoyl-stearoylethanolamine (SOPE), 1-stearoyl-2-oleoyl-phosphatidylcholine (SOPC), sphingomyelin, phosphatidylcholine, phosphatidylethanolamine, phosphatidylserine, phosphatidylinositol, phosphatidic acid, palmitoyl oleoyl phosphatidylcholine, lysophosphatidylcholine, lysophosphatidylethanolamine (LPE), and mixtures thereof.

[0221] In some more preferred embodiments, the neutral lipid is DOPE and/or DSPC.

[0222] In some preferred embodiments, the structured lipid is selected from one or more of the following: cholesterol, nonsterol, sitosterol, ergosterol, campesterol, stigmasterol, brassinosterol, tomatine, ursolic acid, α-tocopherol, or corticosteroid.

[0223] In some more preferred embodiments, the structured lipid is cholesterol.

[0224] In some preferred embodiments, the polymer-conjugated lipid is selected from one or more of PEG-modified phosphatidylethanolamine, PEG-modified phosphatidic acid, PEG-modified ceramide, PEG-modified dialkylamine, PEG-modified diacylglycerol, or PEG-modified dialkylglycerol.

[0225] In some more preferred embodiments, the polymer-conjugated lipid is selected from one or more of distearoyl phosphatidylethanolamine polyethylene glycol 2000 (DSPE-PEG2000), dimyristoylglycerol-3-methoxypolyethylene glycol 2000 (DMG-PEG2000), or methoxypolyethylene glycol ditetradecylacetamide (ALC-0159).

[0226] The pharmaceutical composition of the present disclosure includes, but is not limited to, solutions, emulsions, and liposome-containing formulations. These compositions can be derived from a variety of components, including, but not limited to, preformed liquids, self-emulsifying solids, and self-emulsifying semisolids. Particularly preferred are formulations targeting the liver when treating hepatic disorders (e.g., hepatocellular carcinoma).

[0227] The pharmaceutical formulation of the present disclosure (which may conveniently be in unit dosage form) can be prepared according to conventional techniques well known in the pharmaceutical industry. Such techniques include the step of bringing into association the active ingredients with the pharmaceutical carrier(s) or excipient(s). Generally, the formulations are prepared by uniformly and intimately bringing into association the active ingredients with a liquid carrier or a finely divided solid carrier or both, and then, if necessary, shaping the product.

[0228] The composition of the present disclosure can be formulated into any of many possible dosage forms such as, but not limited to, tablets, capsules, gel capsules, liquid syrups, softgels, suppositories, and enemas. The composition of the present disclosure can also be formulated as a suspension in aqueous, non-aqueous, or mixed media. Aqueous suspensions may further comprise substances that increase the viscosity of the suspension, including, for example, sodium carboxymethylcellulose, sorbitol, and/or dextran. The suspension may also comprise a stabilizer.

[0229] Certain compositions of the present disclosure further incorporate a carrier compound into the formulation. As used herein, “carrier compound” or “carrier” may refer to a nucleic acid or analog thereof that is inert (i.e., lacks biological activity per se) but is recognized as a nucleic acid by in vivo processes that reduce the bioavailability of a biologically active nucleic acid by, for example, degrading the biologically active nucleic acid or facilitating its removal from circulation. Co-administration of a nucleic acid and a carrier compound (typically in excess of the latter) can result in a substantial reduction in the amount of nucleic acid recovered from the liver, kidney, or other extracirculatory reservoirs, presumably due to competition between the carrier compound and the nucleic acid for a common receptor. For example, co-administration with polyinosinic acid, dextran sulfate, polycytidylic acid, or 4-acetamido-4′-isothiocyano-stilbene-2,2′-disulfonic acid can reduce the recovery of partially phosphorothioated dsRNA in hepatic tissue (Miyao et al., DsRNA Res. Dev., 1995, 5, 115-121; Takakura et al., DsRNA & Nucl. Acid Drug Dev., 1996, 6, 177-183).

[0230] In contrast to carrier compounds, a “pharmaceutical carrier” or “excipient” is a pharmaceutically acceptable solvent, suspending agent, or any other pharmacologically inert vehicle for delivering one or more nucleic acids to an animal. The excipient may be liquid or solid and is selected, in combination with a nucleic acid and other components of a particular pharmaceutical composition, to provide the desired bulk, consistency, etc., with reference to the intended mode of administration. Typical pharmaceutical carriers include, but are not limited to, binders (e.g., pregelatinized corn starch, polyvinylpyrrolidone, or hydroxypropyl methylcellulose); fillers (e.g., lactose and other sugars, microcrystalline cellulose, pectin, gelatin, calcium sulfate, ethyl cellulose, polyacrylates, or calcium hydrogen phosphate); lubricants (e.g., magnesium stearate, talc, silica, colloidal silicon dioxide, stearic acid, metallic stearate, hydrogenated vegetable oil, corn starch, polyethylene glycol, sodium benzoate, or sodium acetate); disintegrants (e.g., starch or sodium starch glycolate); and wetting agents (e.g., sodium lauryl sulfate).

[0231] Pharmaceutically acceptable organic or inorganic excipients suitable for non-parenteral administration that do not deleteriously react with nucleic acids may also be used to formulate the compositions of the present disclosure. Suitable pharmaceutically acceptable carriers include, but are not limited to, water, salt solutions, alcohols, polyethylene glycol, gelatin, lactose, amylose, magnesium stearate, talc, silicic acid, viscous paraffin, hydroxymethylcellulose, polyvinylpyrrolidone, etc.

[0232] Formulations for topical administration of nucleic acids may include sterile or non-sterile aqueous solutions or non-aqueous solutions in common solvents such as alcohols, or nucleic acid solutions in liquid or solid oil bases. The solutions may further include buffers, diluents, and other suitable additives. Pharmaceutically acceptable organic or inorganic excipients suitable for non-parenteral administration that do not deleteriously react with nucleic acids may be used.

[0233] Suitable pharmaceutically acceptable excipients include, but are not limited to, water, salt solutions, alcohols, polyethylene glycol, gelatin, lactose, amylose, magnesium stearate, talc, silicic acid, viscous paraffin, hydroxymethylcellulose, polyvinylpyrrolidone, etc.

[0234] The present disclosure also provides methods for treating or preventing diseases and disorders that can be modulated by downregulating the AGT gene expression. For example, treatment of hypertension, borderline hypertension, primary hypertension, secondary hypertension, hypertensive crisis, hypertensive urgency, isolated systolic and diastolic hypertension, pregnancy-associated hypertension, diabetic hypertension, resistant hypertension, refractory hypertension, paroxysmal hypertension, renovascular hypertension, Goldblatt hypertension, ocular hypertension, glaucoma, pulmonary hypertension, portal hypertension, systemic venous hypertension, systolic hypertension, labile hypertension, hypertensive heart disease, hypertensive nephropathy, atherosclerosis, arteriosclerosis, vasculopathy, diabetic nephropathy, diabetic retinopathy, chronic heart failure, cardiomyopathy, diabetic cardiomyopathy, glomerulosclerosis, aortic coarctation, aortic aneurysm, ventricular fibrosis, Cushing's syndrome and other glucocorticoid excess states (including chronic steroid therapy), pheochromocytoma, reninoma, secondary hyperaldosteronism and other mineralocorticoid excess states, sleep apnea, thyroid/parathyroid diseases, heart failure, myocardial infarction, angina, stroke, diabetes, nephropathy, renal failure, systemic sclerosis, intrauterine growth retardation (IUGR), and fetal growth restriction.

[0235] The RNAi agent of the present disclosure may be administered to a subject using any mode of administration known in the art, including, but not limited to, subcutaneous, intravenous, intramuscular, intraocular, intrabronchial, intrapleural, intraperitoneal, intraarterial, lymphatic, cerebrospinal, and any combination thereof. In a preferred example, the agents are administered subcutaneously.

[0236] In further examples, the siRNA is administered in combination with an additional therapeutic agent. The siRNA and an additional therapeutic agent may be administered in combination in the same composition, e.g., parenterally, or the additional therapeutic agent may be administered as part of a separate composition or by another method described herein.

[0237] Examples of additional therapeutic agents include those known to treat hypertension or those known to treat cardiovascular and cerebrovascular diseases. For example, additional antihypertensive agents are selected from angiotensin-converting enzyme inhibitors (e.g., captopril, enalapril, benazepril, perindopril), angiotensin II receptor antagonists (e.g., losartan, losartan hydrochlorothiazide, valsartan, valsartan hydrochlorothiazide, telmisartan, telmisartan hydrochlorothiazide, olmesartan medoxomil), β-blockers (e.g., propranolol, bisoprolol, metoprolol tartrate, metoprolol succinate).

[0238] In one example, the iRNA agent is administered to a patient, followed by administration of the additional therapeutic agent to the patient (or vice versa). In another example, the iRNA agent and the additional therapeutic agent are administered simultaneously.

[0239] The following examples are provided to illustrate the present disclosure but are not intended to limit the scope thereof. Unless otherwise specified, the technical means used in the examples are conventional means well known to those skilled in the art, and all raw materials are commercially available products.

### The Abbreviations for Nucleotides Used Herein are as Follows:

[0240] A=adenosine-3′-phosphate
[0241] Am=2′-O-methyladenosine-3′-phosphate
[0242] Ams=2′-O-methyladenosine-3′-thiophosphate
[0243] Af=2′-fluoroadenosine-3′-phosphate
[0244] Afs=2′-fluoroadenosine-3′-thiophosphate
[0245] G=guanosine-3′-phosphate
[0246] Gm=2′-O-methylguanosine-3′-phosphate
[0247] Gms=2′-O-methylguanosine-3′-thiophosphate
[0248] Gf=2′-fluoroguanosine-3′-phosphate
[0249] Gfs=2′-fluoroguanosine-3′-thiophosphate
[0250] C=cytidine-3′-phosphate
[0251] Cm=2′-O-methylcytidine-3′-phosphate
[0252] Cms=2′-O-methylcytidine-3′-thiophosphate
[0253] Cf=2′-fluorocytidine-3′-phosphate
[0254] Cfs=2′-fluorocytidine-3′-thiophosphate
[0255] U=uridine-3′-phosphate
[0256] Um=2′-O-methyluridine-3′-phosphate
[0257] Ums=2′-O-methyluridine-3′-thiophosphate
[0258] Uf=2′-fluorouridine-3′-phosphate
[0259] Ufs=2′-fluorouridine-3′-thiophosphate
[0260] AmsEVP=5′-ethenyl-(E)-phosphonate-2′-O-methyladenosine-3′-thiophosphate
[0261] UmsEVP=5′-ethenyl-(E)-phosphonate-2′-O-methyluridine-3′-thiophosphate
[0262] Agna=adenosine-glycol nucleic acid
[0263] Cgna=cytidine-glycol nucleic acid
[0264] Ggna=guanosine-glycol nucleic acid
[0265] Tgna=thymidine-glycol nucleic acid
[0266] Ugna=uridine-glycol nucleic acid

### The Modifications Used Herein Correspond to the Following English Names:

[0267] 2′-O-Methyl: 2′-O-methyl
[0268] 2′-Fluoro: 2′-fluoro
[0269] 3′-Thiophosphate: 3′-thiophosphate
[0270] 5′-Ethenyl-(E)-phosphonate: 5′-ethenyl-(E)-phosphonate
[0271] 2′-Deoxy: 2′-deoxy

[0272] The numbering schemes for compounds used herein is as follows:

[0273] Unmodified sequences refer to unmodified RNA sequences. For sequences in which the sense and antisense strands are 21 and 23 nucleotides in length, respectively, the number represents the position on the AGT mRNA, such as compound 1579. For sequences in which the sense and antisense strands are 20 and 22 nucleotides in length, respectively, the suffix “s” is added after the number of the representative position for distinction, such as compound 1578s.

[0274] Sequences alternately modified with 2′-O-methyl (2′-OMe) and 2′-fluoro (2′-F) are designated by adding the prefix “B” before the number of the unmodified sequence, and appending the suffix “-AL” after the number. For example, the alternately modified sequence 1578s is designated as B1578s-AL.

[0275] For compounds in Example 4, sequences modified using the templates DV25P-29P and DV32P-34P disclosed herein or the template DV22 disclosed in the prior art are designated by adding the prefix “C” before the number of the unmodified sequence, and appending the corresponding template name after the number. For example, the sequence 1578s modified with the template DV29P is designated as C1578s-DV29P.

[0276] For compounds in Example 6, sequences modified using the templates DV25P-29P and DV32P-34P disclosed herein or the template DV22 disclosed in the prior art, and optionally containing anti-off-target modifications, are designated by removing the initial digit “1” from the number of the unmodified sequence, adding the prefix “D” before the number, and appending the corresponding template name and anti-off-target modification name in sequence. For example, the unmodified sequence 1578s modified with the template DV29P and containing the anti-off-target modification d7B is designated as D578s-DV29Pd7B.

[0277] For compounds in Example 7, sequences modified using the template DV25P-29P disclosed herein, optionally containing anti-off-target modifications, and conjugated with GalNAc at the 3′ end of the sense strand for liver-targeted delivery, are designated by appending “G5” to the end based on the numbering scheme in Example 6. For example, the sequence D578s-DV29Pd7B conjugated with G5 is designated as D578s-DV29Pd7BG5.

TABLE 49
Numbering schemes used in examples

| | | Alternately | Specifically | Anti-off-target | In vivo |
|---|---|---|---|---|---|
| Type of | Unmodified | modified | modified | modified | experimental |
| numbering | sequence | sequence | sequence | sequence | sequence |
| Example of | 1578s | B1578s-AL | C1578s-DV29P | D578s- | D578s- |
| numbering | | | | DV29Pd7B | DV29Pd7BG5 |

[0278] In the following examples, the P-values of intergroup comparisons are less than 0.05, indicating statistically significant differences.

### EXAMPLES

### Example 1: Synthesis of Alternately Modified Small Interfering Oligonucleotides

[0279] 99 unmodified siRNA sequences were designed based on the AGT mRNA sequence (NM_001384479.1). To enhance the inhibitory efficiency and stability of the sequences, the unmodified sequences were alternately modified with 2′-O-methyl (2′-OMe) and 2′-fluoro (2′-F), with terminal phosphorothioate modifications. For sense strands of odd-numbered length, the odd-numbered positions were modified with 2′-F, and the even-numbered positions were modified with 2′-OMe. However, for sense strands of even-numbered length, the odd-numbered positions were modified with 2′-OMe, and the even-numbered positions were modified with 2′-F. For antisense strands, the odd-numbered positions were modified with 2′-OMe, and the even-numbered positions were modified with 2′-F. In addition, the 5′ end of the sense strand contained two phosphorothioate modifications, while the 5′ and 3′ ends of the antisense strand each contained two phosphorothioate modifications. The siRNA sequences with alternating modifications are shown in Table 2.

### 1. Synthesis of Alternately Modified Sequence B1579-AL

[0280] The unmodified sequence of the small interfering ribonucleic acid designated as B1579-AL in Table 1 is as follows:

(SEQ ID NO: 4)
Sense strand: 5′-CCUUUUCUUCUAAUGAGUCGA-3′
(SEQ ID NO: 17)
Antisense strand: 5′-UCGACUCAUUAGAAGAAAAGGUG-3′

[0281] The odd-numbered positions of the sense strand and the even-numbered positions of the antisense strand were modified with 2′-F, while all other positions were modified with 2′-OMe. In addition, the 5′ end of the sense strand contained two phosphorothioate modifications, while the 5′ and 3′ ends of the antisense strand each contained two phosphorothioate modifications.

[0282] Instruments and reagents: A Tsingke 192 P model DNA/RNA automatic synthesizer was used. The solid-phase support was a universal support composed of cross-linked polystyrene beads, model: Primer Support 5G Unylinker 350 (manufactured by Cytiva).

### Preparation Method:

[0283] Nucleoside phosphoramidite monomer solutions were prepared in acetonitrile at a concentration of 0.15 M, using the following monomers: DMT-A-OMe phosphoramidite monomer (Formula 1), DMT-C-OMe phosphoramidite monomer (Formula 2), DMT-G-OMe phosphoramidite monomer (Formula 3), DMT-U-OMe phosphoramidite monomer (Formula 4), DMT-A-F phosphoramidite monomer (Formula 5), DMT-C-F phosphoramidite monomer (Formula 6), DMT-G-F phosphoramidite monomer (Formula 7), and DMT-U-F phosphoramidite monomer (Formula 8).

[chemical structure]

[chemical structure]

[chemical structure]

[chemical structure]

[0284] The preparation was carried out according to the following steps:

[0285] The solid-phase support was loaded into the designated position of the synthesizer, and a corresponding fully protected product was obtained through several synthesis cycles, each cycle including (1) deprotection, (2) coupling, (3) oxidation/sulfurization, and (4) hydroxyl protection. The cycle process and the reagents used are described as follows:

### (1) Deprotection

[0286] 3% dichloroacetic acid in toluene was used as a deprotection reagent to remove the DMT protecting group, followed by washing with acetonitrile.

### (2) Coupling

[0287] Each nucleoside phosphoramidite monomer in acetonitrile was coupled using 0.25 M 5-ethylthio-1H-tetrazole as an activator, followed by rinsing with acetonitrile.

### (3) Oxidation/Sulfurization

[0288] Oxidation: 0.05 M iodine in pyridine/water (90/10) was used as an oxidant for oxidation, followed by rinsing with acetonitrile.

[0289] Sulfurization: 3% xanthane hydride in pyridine was used as a sulfurizing agent for sulfurization, followed by rinsing with acetonitrile.

### (4) Hydroxyl Protection

[0290] 10% acetic anhydride in tetrahydrofuran (CAP A) and tetrahydrofuran/pyridine/N-methylimidazole (74/10/16, v/v/v) (CAP B) were used as hydroxyl protecting reagents for hydroxyl protection, followed by rinsing with acetonitrile.

[0291] The above steps were repeated according to the set sequence to obtain the fully protected product.

(5) 3% dichloroacetic acid in toluene was used as a deprotection reagent to remove the DMT protecting group from the last nucleotide, followed by washing with acetonitrile.

### (6) Ammonolysis and Purification

[0292] The solid-phase support was transferred to a reactor, then concentrated aqueous ammonia (25 to 280%) was added, and ammonolysis was performed at 60° C. for 12 hours. The system was then cooled to room temperature, and the mixture was transferred to a pressure filtration vessel, followed by rinsing with a mixture of purified water and ethanol. The filtrates were combined, subjected to column chromatography, concentrated, and lyophilized to obtain the product.

### (7) Annealing

[0293] The purified sense and antisense strands were mixed at a ratio of 1:1, heated to 95° C. and maintained for 3 minutes, and slowly cooled to room temperature to form a duplex.

[0294] B1579-AL had a purity of 90.61% and a measured molecular weight of 14437.86.

### 2. Synthesis of Other Sequences

[0295] The other sequences listed in Table 1 were synthesized according to the method described above, totaling 99 siRNA sequences.

TABLE 1
Alternately modified siRNA sequences

| | | Sequence SEQ | | Sequence SEQ |
|---|---|---|---|---|
| | | ID NO./ | | ID NO./ |
| | | corresponding | | corresponding |
| | | unmodified | | unmodified |
| Sequence | Sense strand | sequence SEQ | Antisense strand | sequence SEQ |
| ID | sequence 5′-3′ | ID NO. | sequence 5′-3′ | ID NO. |
| B1835- | Ufs-Ums-Gf-Gm-Gf-Um-Uf- | 199/1 | Ums-Afs-Cm-Uf-Um-Uf-Am-Af- | 212/14 |
| AL | Um-Uf-Am-Af-Am-Af-Um- | | Um-Uf-Um-Uf-Am-Af-Am-Af- | |
| | Uf-Am-Af-Am-Gf-Um-Af | | Cm-Cf-Cm-Af-Ams-Ufs-Um | |
| B1816- | Ufs-Ums-Cf-Am-Af-Gm-Uf- | 200/2 | Ams-Afs-Um-Uf-Um-Uf-Um-Gf- | 213/15 |
| AL | Um-Gf-Am-Gf-Am-Af-Cm- | | Um-Uf-Cm-Uf-Cm-Af-Am-Cf- | |
| | Af-Am-Af-Am-Af-Um-Uf | | Um-Uf-Gm-Af-Ams-Afs-Am | |
| B1812- | Cfs-Cms-Uf-Um-Uf-Um-Cf- | 201/3 | Ums-Ufs-Um-Gf-Um-Uf-Cm-Uf- | 214/16 |
| AL | Am-Af-Gm-Uf-Um-Gf-Am- | | Cm-Af-Am-Cf-Um-Uf-Gm-Af- | |
| | Gf-Am-Af-Cm-Af-Am-Af | | Am-Af-Am-Gf-Gms-Gfs-Am | |
| B1579- | Cfs-Cms-Uf-Um-Uf-Um-Cf- | 202/4 | Ums-Cfs-Gm-Af-Cm-Uf-Cm-Af- | 215/17 |
| AL | Um-Uf-Cm-Uf-Am-Af-Um- | | Um-Uf-Am-Gf-Am-Af-Gm-Af- | |
| | Gf-Am-Gf-Um-Cf-Gm-Af | | Am-Af-Am-Gf-Gms-Ufs-Gm | |
| B1836- | Ufs-Gms-Gf-Gm-Uf-Um-Uf- | 203/5 | Ams-Ufs-Am-Cf-Um-Uf-Um-Af- | 216/18 |
| AL | Um-Af-Am-Af-Am-Uf-Um- | | Am-Uf-Um-Uf-Um-Af-Am-Af- | |
| | Af-Am-Af-Gm-Uf-Am-Uf | | Am-Cf-Cm-Cf-Ams-Afs-Um | |
| B1789- | Gfs-Ums-Uf-Um-Gf-Um-Gf- | 204/6 | Ams-Cfs-Am-Cf-Um-Uf-Um-Uf- | 217/19 |
| AL | Am-Af-Am-Cf-Am-Af-Am- | | Um-Uf-Gm-Uf-Um-Uf-Cm-Af- | |
| | Af-Am-Af-Gm-Uf-Gm-Uf | | Cm-Af-Am-Af-Cms-Afs-Am | |
| B1839- | Gfs-Ums-Uf-Um-Uf-Am-Af- | 205/7 | Ums-Gfs-Um-Af-Um-Af-Cm-Uf- | 218/20 |
| AL | Am-Af-Um-Uf-Am-Af-Am- | | Um-Uf-Am-Af-Um-Uf-Um-Uf- | |
| | Gf-Um-Af-Um-Af-Cm-Af | | Am-Af-Am-Af-Cms-Cfs-Cm | |
| B1791- | Ufs-Ums-Gf-Um-Gf-Am-Af- | 206/8 | Ums-Afs-Am-Cf-Am-Cf-Um-Uf- | 219/21 |
| AL | Am-Cf-Am-Af-Am-Af-Am- | | Um-Uf-Um-Uf-Gm-Uf-Um-Uf- | |
| | Af-Gm-Uf-Gm-Uf-Um-Af | | Cm-Af-Cm-Af-Ams-Afs-Cm | |
| B1795- | Gfs-Ams-Af-Am-Cf-Am-Af- | 207/9 | Ams-Afs-Gm-Gf-Gm-Af-Am-Cf- | 220/22 |
| AL | Am-Af-Am-Af-Gm-Uf-Gm- | | Am-Cf-Um-Uf-Um-Uf-Um-Uf- | |
| | Uf-Um-Cf-Cm-Cf-Um-Uf | | Gm-Uf-Um-Uf-Cms-Afs-Cm | |
| B1585s- | Cms-Ufs-Um-Cf-Um-Af- | 208/10 | Ums-Afs-Am-Af-Gm-Uf-Cm-Gf- | 221/23 |
| AL | Am-Uf-Gm-Af-Gm-Uf-Cm- | | Am-Cf-Um-Cf-Am-Uf-Um-Af- | |
| | Gf-Am-Cf-Um-Uf-Um-Af | | Gm-Af-Am-Gfs-Ams-Af | |
| B1576s- | Cms-Cfs-Am-Cf-Cm-Uf-Um- | 209/11 | Ums-Ufs-Cm-Af-Um-Uf-Am-Gf- | 222/24 |
| AL | Uf-Um-Cf-Um-Uf-Cm-Uf- | | Am-Af-Gm-Af-Am-Af-Am-Gf- | |
| | Am-Af-Um-Gf-Am-Af | | Gm-Uf-Gm-Gfs-Gms-Af | |
| B1578s- | Ams-Cfs-Cm-Uf-Um-Uf- | 210/12 | Ums-Afs-Cm-Uf-Cm-Af-Um-Uf- | 223/25 |
| AL | Um-Cf-Um-Uf-Cm-Uf-Am- | | Am-Gf-Am-Af-Gm-Af-Am-Af- | |
| | Af-Um-Gf-Am-Gf-Um-Af | | Am-Gf-Gm-Ufs-Gms-Gf | |
| B1838- | Gfs-Gms-Uf-Um-Uf-Um-Af- | 211/13 | Ums-Ufs-Am-Uf-Am-Cf-Um-Uf- | 224/26 |
| AL | Am-Af-Am-Uf-Um-Af-Am- | | Um-Af-Am-Uf-Um-Uf-Um-Af- | |
| | Af-Gm-Uf-Am-Uf-Am-Af | | Am-Af-Am-Cf-Cms-Cfs-Am | |
| B1008- | Cfs-Ums-Uf-Cm-Af-Cm-Uf- | 225/27 | Ams-Gfs-Gm-Cf-Am-Gf-Gm-Cf- | 311/113 |
| AL | Gm-Af-Gm-Af-Gm-Cf-Gm- | | Gm-Cf-Um-Cf-Um-Cf-Am-Gf- | |
| | Cf-Cm-Uf-Gm-Cf-Cm-Uf | | Um-Gf-Am-Af-Gms-Gfs-Gm | |
| B1011- | Cfs-Ams-Cf-Um-Gf-Am-Gf- | 226/28 | Ams-Gfs-Cm-Af-Gm-Gf-Cm-Af- | 312/114 |
| AL | Am-Gf-Cm-Gf-Cm-Cf-Um- | | Gm-Gf-Cm-Gf-Cm-Uf-Cm-Uf- | |
| | Gf-Cm-Cf-Um-Gf-Cm-Uf | | Cm-Af-Gm-Uf-Gms-Afs-Am | |
| B1014- | Ufs-Gms-Af-Gm-Af-Gm-Cf- | 227/29 | Ams-Gfs-Cm-Af-Gm-Cf-Am-Gf- | 313/115 |
| AL | Gm-Cf-Cm-Uf-Gm-Cf-Cm- | | Gm-Cf-Am-Gf-Gm-Cf-Gm-Cf- | |
| | Uf-Gm-Cf-Um-Gf-Cm-Uf | | Um-Cf-Um-Cf-Ams-Gfs-Um | |
| B1016- | Afs-Gms-Af-Gm-Cf-Gm-Cf- | 228/30 | Ums-Cfs-Am-Gf-Cm-Af-Gm-Cf- | 314/116 |
| AL | Cm-Uf-Gm-Cf-Cm-Uf-Gm- | | Am-Gf-Gm-Cf-Am-Gf-Gm-Cf- | |
| | Cf-Um-Gf-Cm-Uf-Gm-Af | | Gm-Cf-Um-Cf-Ums-Cfs-Am | |
| B1017- | Gfs-Ams-Gf-Cm-Gf-Cm-Cf- | 229/31 | Ams-Ufs-Cm-Af-Gm-Cf-Am-Gf- | 315/117 |
| AL | Um-Gf-Cm-Cf-Um-Gf-Cm- | | Cm-Af-Gm-Gf-Cm-Af-Gm-Gf- | |
| | Uf-Gm-Cf-Um-Gf-Am-Uf | | Cm-Gf-Cm-Uf-Cms-Ufs-Cm | |
| B1020- | Cfs-Gms-Cf-Cm-Uf-Gm-Cf- | 230/32 | Ums-Gfs-Gm-Af-Um-Cf-Am-Gf- | 316/118 |
| AL | Cm-Uf-Gm-Cf-Um-Gf-Cm- | | Cm-Af-Gm-Cf-Am-Gf-Gm-Cf- | |
| | Uf-Gm-Af-Um-Cf-Cm-Af | | Am-Gf-Gm-Cf-Gms-Cfs-Um | |
| B1024- | Ufs-Gms-Cf-Cm-Uf-Gm-Cf- | 231/33 | Ams-Gfs-Gm-Cf-Um-Gf-Gm-Af- | 317/119 |
| AL | Um-Gf-Cm-Uf-Gm-Af-Um- | | Um-Cf-Am-Gf-Cm-Af-Gm-Cf- | |
| | Cf-Cm-Af-Gm-Cf-Cm-Uf | | Am-Gf-Gm-Cf-Ams-Gfs-Gm | |
| B1026- | Cfs-Cms-Uf-Gm-Cf-Um-Gf- | 232/34 | Ums-Gfs-Am-Gf-Gm-Cf-Um-Gf- | 318/120 |
| AL | Cm-Uf-Gm-Af-Um-Cf-Cm- | | Gm-Af-Um-Cf-Am-Gf-Cm-Af- | |
| | Af-Gm-Cf-Cm-Uf-Cm-Af | | Gm-Cf-Am-Gf-Gms-Cfs-Am | |
| B1028- | Ufs-Gms-Cf-Um-Gf-Cm-Uf- | 233/35 | Ams-Gfs-Um-Gf-Am-Gf-Gm-Cf- | 319/121 |
| AL | Gm-Af-Um-Cf-Cm-Af-Gm- | | Um-Gf-Gm-Af-Um-Cf-Am-Gf- | |
| | Cf-Cm-Uf-Cm-Af-Cm-Uf | | Cm-Af-Gm-Cf-Ams-Gfs-Gm | |
| B1029- | Gfs-Cms-Uf-Gm-Cf-Um-Gf- | 234/36 | Ums-Afs-Gm-Uf-Gm-Af-Gm-Gf- | 320/122 |
| AL | Am-Uf-Cm-Cf-Am-Gf-Cm- | | Cm-Uf-Gm-Gf-Am-Uf-Cm-Af- | |
| | Cf-Um-Cf-Am-Cf-Um-Af | | Gm-Cf-Am-Gf-Cms-Afs-Gm | |
| B1030- | Cfs-Ums-Gf-Cm-Uf-Gm-Af- | 235/37 | Ams-Ufs-Am-Gf-Um-Gf-Am-Gf- | 321/123 |
| AL | Um-Cf-Cm-Af-Gm-Cf-Cm- | | Gm-Cf-Um-Gf-Gm-Af-Um-Cf- | |
| | Uf-Cm-Af-Cm-Uf-Am-Uf | | Am-Gf-Cm-Af-Gms-Cfs-Am | |
| B1038- | Cfs-Cms-Af-Gm-Cf-Cm-Uf- | 236/38 | Ums-Cfs-Am-Gf-Am-Gf-Gm-Cf- | 322/124 |
| AL | Cm-Af-Cm-Uf-Am-Uf-Gm- | | Am-Uf-Am-Gf-Um-Gf-Am-Gf- | |
| | Cf-Cm-Uf-Cm-Uf-Gm-Af | | Gm-Cf-Um-Gf-Gms-Afs-Um | |
| B1041- | Gfs-Cms-Cf-Um-Cf-Am-Cf- | 237/39 | Ams-Gfs-Gm-Uf-Cm-Af-Gm-Af- | 323/125 |
| AL | Um-Af-Um-Gf-Cm-Cf-Um- | | Gm-Gf-Cm-Af-Um-Af-Gm-Uf- | |
| | Cf-Um-Gf-Am-Cf-Cm-Uf | | Gm-Af-Gm-Gf-Cms-Ufs-Gm | |
| B1044- | Ufs-Cms-Af-Cm-Uf-Am-Uf- | 238/40 | Ums-Cfs-Cm-Af-Gm-Gf-Um-Cf- | 324/126 |
| AL | Gm-Cf-Cm-Uf-Cm-Uf-Gm- | | Am-Gf-Am-Gf-Gm-Cf-Am-Uf- | |
| | Af-Cm-Cf-Um-Gf-Gm-Af | | Am-Gf-Um-Gf-Ams-Gfs-Gm | |
| B1046- | Afs-Cms-Uf-Am-Uf-Gm-Cf- | 239/41 | Ums-Gfs-Um-Cf-Cm-Af-Gm-Gf- | 325/127 |
| AL | Cm-Uf-Cm-Uf-Gm-Af-Cm- | | Um-Cf-Am-Gf-Am-Gf-Gm-Cf- | |
| | Cf-Um-Gf-Gm-Af-Cm-Af | | Am-Uf-Am-Gf-Ums-Gfs-Am | |
| B1047- | Cfs-Ums-Af-Um-Gf-Cm-Cf- | 240/42 | Ums-Ufs-Gm-Uf-Cm-Cf-Am-Gf- | 326/128 |
| AL | Um-Cf-Um-Gf-Am-Cf-Cm- | | Gm-Uf-Cm-Af-Gm-Af-Gm-Gf- | |
| | Uf-Gm-Gf-Am-Cf-Am-Af | | Cm-Af-Um-Af-Gms-Ufs-Gm | |
| B1053- | Cfs-Ums-Cf-Um-Gf-Am-Cf- | 241/43 | Ums-Cfs-Cm-Af-Cm-Cf-Um-Uf- | 327/129 |
| AL | Cm-Uf-Gm-Gf-Am-Cf-Am- | | Gm-Uf-Cm-Cf-Am-Gf-Gm-Uf- | |
| | Af-Gm-Gf-Um-Gf-Gm-Af | | Cm-Af-Gm-Af-Gms-Gfs-Cm | |
| B1057- | Gfs-Ams-Cf-Cm-Uf-Gm-Gf- | 242/44 | Ams-Cfs-Cm-Cf-Um-Cf-Cm-Af- | 328/130 |
| AL | Am-Cf-Am-Af-Gm-Gf-Um- | | Cm-Cf-Um-Uf-Gm-Uf-Cm-Cf- | |
| | Gf-Gm-Af-Gm-Gf-Gm-Uf | | Am-Gf-Gm-Uf-Cms-Afs-Gm | |
| B1061- | Ufs-Gms-Gf-Am-Cf-Am-Af- | 243/45 | Ums-Gfs-Am-Gf-Am-Cf-Cm-Cf- | 329/131 |
| AL | Gm-Gf-Um-Gf-Gm-Af-Gm- | | Um-Cf-Cm-Af-Cm-Cf-Um-Uf- | |
| | Gf-Gm-Uf-Cm-Uf-Cm-Af | | Gm-Uf-Cm-Cf-Ams-Gfs-Gm | |
| B1065s- | Cms-Afs-Am-Gf-Gm-Uf- | 244/46 | Ams-Afs-Gm-Uf-Gm-Af-Gm-Af- | 330/132 |
| AL | Gm-Gf-Am-Gf-Gm-Gf-Um- | | Cm-Cf-Cm-Uf-Cm-Cf-Am-Cf- | |
| | Cf-Um-Cf-Am-Cf-Um-Uf | | Cm-Uf-Um-Gfs-Ums-Cf | |
| B1071- | Gfs-Gms-Af-Gm-Gf-Gm-Uf- | 245/47 | Ums-Gfs-Cm-Uf-Gm-Gf-Am-Af- | 331/133 |
| AL | Cm-Uf-Cm-Af-Cm-Uf-Um- | | Am-Gf-Um-Gf-Am-Gf-Am-Cf- | |
| | Uf-Cm-Cf-Am-Gf-Cm-Af | | Cm-Cf-Um-Cf-Cms-Afs-Cm | |
| B1260- | Cfs-Ams-Gf-Gm-Gf-Um-Gf- | 246/48 | Ums-Ufs-Cm-Af-Gm-Cf-Am-Cf- | 332/134 |
| AL | Gm-Gf-Gm-Gf-Am-Gf-Gm- | | Cm-Uf-Cm-Cf-Cm-Cf-Cm-Af- | |
| | Uf-Gm-Cf-Um-Gf-Am-Af | | Cm-Cf-Cm-Uf-Gms-Afs-Um | |
| B1262- | Gfs-Gms-Gf-Um-Gf-Gm-Gf- | 247/49 | Ums-Gfs-Um-Uf-Cm-Af-Gm-Cf- | 333/135 |
| AL | Gm-Gf-Am-Gf-Gm-Uf-Gm- | | Am-Cf-Cm-Uf-Cm-Cf-Cm-Cf- | |
| | Cf-Um-Gf-Am-Af-Cm-Af | | Cm-Af-Cm-Cf-Cms-Ufs-Gm | |
| B1265- | Ufs-Gms-Gf-Gm-Gf-Gm-Af- | 248/50 | Ums-Gfs-Cm-Uf-Gm-Uf-Um-Cf- | 334/136 |
| AL | Gm-Gf-Um-Gf-Cm-Uf-Gm- | | Am-Gf-Cm-Af-Cm-Cf-Um-Cf- | |
| | Af-Am-Cf-Am-Gf-Cm-Af | | Cm-Cf-Cm-Cf-Ams-Cfs-Cm | |
| B1266- | Gfs-Gms-Gf-Gm-Gf-Am-Gf- | 249/51 | Ams-Ufs-Gm-Cf-Um-Gf-Um-Uf- | 335/137 |
| AL | Gm-Uf-Gm-Cf-Um-Gf-Am- | | Cm-Af-Gm-Cf-Am-Cf-Cm-Uf- | |
| | Af-Cm-Af-Gm-Cf-Am-Uf | | Cm-Cf-Cm-Cf-Cms-Afs-Cm | |
| B1267- | Gfs-Gms-Gf-Gm-Af-Gm-Gf- | 250/52 | Ams-Afs-Um-Gf-Cm-Uf-Gm-Uf- | 336/138 |
| AL | Um-Gf-Cm-Uf-Gm-Af-Am- | | Um-Cf-Am-Gf-Cm-Af-Cm-Cf- | |
| | Cf-Am-Gf-Cm-Af-Um-Uf | | Um-Cf-Cm-Cf-Cms-Cfs-Am | |
| B1268- | Gfs-Gms-Gf-Am-Gf-Gm-Uf- | 251/53 | Ams-Afs-Am-Uf-Gm-Cf-Um-Gf- | 337/139 |
| AL | Gm-Cf-Um-Gf-Am-Af-Cm- | | Um-Uf-Cm-Af-Gm-Cf-Am-Cf- | |
| | Af-Gm-Cf-Am-Uf-Um-Uf | | Cm-Uf-Cm-Cf-Cms-Cfs-Cm | |
| B1279- | Afs-Ams-Cf-Am-Gf-Cm-Af- | 252/54 | Ams-Afs-Gm-Cf-Um-Cf-Am-Af- | 338/140 |
| AL | Um-Uf-Um-Uf-Um-Uf-Um- | | Am-Af-Am-Af-Am-Af-Um-Gf- | |
| | Uf-Gm-Af-Gm-Cf-Um-Uf | | Cm-Uf-Gm-Uf-Ums-Cfs-Am | |
| B1281- | Cfs-Ams-Gf-Cm-Af-Um-Uf- | 253/55 | Ums-Cfs-Am-Af-Gm-Cf-Um-Cf- | 339/141 |
| AL | Um-Uf-Um-Uf-Um-Uf-Gm- | | Am-Af-Am-Af-Am-Af-Am-Af- | |
| | Af-Gm-Cf-Um-Uf-Gm-Af | | Um-Gf-Cm-Uf-Gms-Ufs-Um | |
| B1282- | Afs-Gms-Cf-Am-Uf-Um-Uf- | 254/56 | Ums-Ufs-Cm-Af-Am-Gf-Cm-Uf- | 340/142 |
| AL | Um-Uf-Um-Uf-Um-Gf-Am- | | Cm-Af-Am-Af-Am-Af-Am-Af- | |
| | Gf-Cm-Uf-Um-Gf-Am-Af | | Am-Uf-Gm-Cf-Ums-Gfs-Um | |
| B1362- | Gfs-Gms-Uf-Gm-Af-Cm-Cf- | 255/57 | Ams-Afs-Um-Gf-Gm-Gf-Cm-Gf- | 341/143 |
| AL | Cm-Uf-Gm-Af-Am-Cf-Cm- | | Gm-Uf-Um-Cf-Am-Gf-Gm-Gf- | |
| | Gf-Cm-Cf-Cm-Af-Um-Uf | | Um-Cf-Am-Cf-Cms-Ufs-Cm | |
| B1365- | Gfs-Ams-Cf-Cm-Cf-Um-Gf- | 256/58 | Ams-Gfs-Gm-Af-Am-Uf-Gm-Gf- | 342/144 |
| AL | Am-Af-Cm-Cf-Gm-Cf-Cm- | | Gm-Cf-Gm-Gf-Um-Uf-Cm-Af- | |
| | Cf-Am-Uf-Um-Cf-Cm-Uf | | Gm-Gf-Gm-Uf-Cms-Afs-Cm | |
| B1367- | Cfs-Cms-Cf-Um-Gf-Am-Af- | 257/59 | Ams-Cfs-Am-Gf-Gm-Af-Am-Uf- | 343/145 |
| AL | Cm-Cf-Gm-Cf-Cm-Cf-Am- | | Gm-Gf-Gm-Cf-Gm-Gf-Um-Uf- | |
| | Uf-Um-Cf-Cm-Uf-Gm-Uf | | Cm-Af-Gm-Gf-Gms-Ufs-Cm | |
| B1369- | Cfs-Ums-Gf-Am-Af-Cm-Cf- | 258/60 | Ams-Afs-Am-Cf-Am-Gf-Gm-Af- | 344/146 |
| AL | Gm-Cf-Cm-Cf-Am-Uf-Um- | | Am-Uf-Gm-Gf-Gm-Cf-Gm-Gf- | |
| | Cf-Cm-Uf-Gm-Uf-Um-Uf | | Um-Uf-Cm-Af-Gms-Gfs-Gm | |
| B1393- | Gfs-Ums-Gf-Um-Af-Um-Gf- | 259/61 | Ams-Gfs-Um-Gf-Gm-Cf-Gm-Cf- | 345/147 |
| AL | Am-Uf-Cm-Af-Am-Af-Gm- | | Um-Uf-Um-Gf-Am-Uf-Cm-Af- | |
| | Cf-Gm-Cf-Cm-Af-Cm-Uf | | Um-Af-Cm-Af-Cms-Afs-Gm | |
| B1401- | Ufs-Cms-Af-Am-Af-Gm-Cf- | 260/62 | Ums-Gfs-Cm-Af-Gm-Gf-Gm-Cf- | 346/148 |
| AL | Gm-Cf-Cm-Af-Cm-Uf-Gm- | | Am-Gf-Um-Gf-Gm-Cf-Gm-Cf- | |
| | Cf-Cm-Cf-Um-Gf-Cm-Af | | Um-Uf-Um-Gf-Ams-Ufs-Cm | |
| B1404- | Afs-Ams-Gf-Cm-Gf-Cm-Cf- | 261/63 | Ams-Afs-Gm-Uf-Gm-Cf-Am-Gf- | 347/149 |
| AL | Am-Cf-Um-Gf-Cm-Cf-Cm- | | Gm-Gf-Cm-Af-Gm-Uf-Gm-Gf- | |
| | Uf-Gm-Cf-Am-Cf-Um-Uf | | Cm-Gf-Cm-Uf-Ums-Ufs-Gm | |
| B1407- | Cfs-Gms-Cf-Cm-Af-Cm-Uf- | 262/64 | Ams-Gfs-Gm-Af-Am-Gf-Um-Gf- | 348/150 |
| AL | Gm-Cf-Cm-Cf-Um-Gf-Cm- | | Cm-Af-Gm-Gf-Gm-Cf-Am-Gf- | |
| | Af-Cm-Uf-Um-Cf-Cm-Uf | | Um-Gf-Gm-Cf-Gms-Cfs-Um | |
| B1554- | Gfs-Cms-Gf-Am-Uf-Gm-Uf- | 263/65 | Ams-Gfs-Am-Cf-Um-Gf-Gm-Gf- | 349/151 |
| AL | Gm-Uf-Cm-Af-Cm-Cf-Cm- | | Gm-Gf-Um-Gf-Am-Cf-Am-Cf- | |
| | Cf-Cm-Af-Gm-Uf-Cm-Uf | | Am-Uf-Cm-Gf-Cms-Ufs-Gm | |
| B1558- | Ufs-Gms-Uf-Gm-Uf-Cm-Af- | 264/66 | Ums-Gfs-Gm-Gf-Am-Gf-Am-Cf- | 350/152 |
| AL | Cm-Cf-Cm-Cf-Cm-Af-Gm- | | Um-Gf-Gm-Gf-Gm-Gf-Um-Gf- | |
| | Uf-Cm-Uf-Cm-Cf-Cm-Af | | Am-Cf-Am-Cf-Ams-Ufs-Cm | |
| B1561- | Gfs-Ums-Cf-Am-Cf-Cm-Cf- | 265/67 | Ams-Gfs-Gm-Uf-Gm-Gf-Gm-Af- | 351/153 |
| AL | Cm-Cf-Am-Gf-Um-Cf-Um- | | Gm-Af-Cm-Uf-Gm-Gf-Gm-Gf- | |
| | Cf-Cm-Cf-Am-Cf-Cm-Uf | | Gm-Uf-Gm-Af-Cms-Afs-Cm | |
| B1562- | Ufs-Cms-Af-Cm-Cf-Cm-Cf- | 266/68 | Ams-Afs-Gm-Gf-Um-Gf-Gm-Gf- | 352/154 |
| AL | Cm-Af-Gm-Uf-Cm-Uf-Cm- | | Am-Gf-Am-Cf-Um-Gf-Gm-Gf- | |
| | Cf-Cm-Af-Cm-Cf-Um-Uf | | Gm-Gf-Um-Gf-Ams-Cfs-Am | |
| B1564- | Afs-Cms-Cf-Cm-Cf-Cm-Af- | 267/69 | Ams-Afs-Am-Af-Gm-Gf-Um-Gf- | 353/155 |
| AL | Gm-Uf-Cm-Uf-Cm-Cf-Cm- | | Gm-Gf-Am-Gf-Am-Cf-Um-Gf- | |
| | Af-Cm-Cf-Um-Uf-Um-Uf | | Gm-Gf-Gm-Gf-Ums-Gfs-Am | |
| B1591- | Afs-Ums-Gf-Am-Gf-Um-Cf- | 268/70 | Ums-Cfs-Cm-Af-Gm-Cf-Um-Cf- | 354/156 |
| AL | Gm-Af-Cm-Uf-Um-Uf-Gm- | | Am-Af-Am-Gf-Um-Cf-Gm-Af- | |
| | Af-Gm-Cf-Um-Gf-Gm-Af | | Cm-Uf-Cm-Af-Ums-Ufs-Am | |
| B1592- | Ufs-Gms-Af-Gm-Uf-Cm-Gf- | 269/71 | Ums-Ufs-Cm-Cf-Am-Gf-Cm-Uf- | 355/157 |
| AL | Am-Cf-Um-Uf-Um-Gf-Am- | | Cm-Af-Am-Af-Gm-Uf-Cm-Gf- | |
| | Gf-Cm-Uf-Gm-Gf-Am-Af | | Am-Cf-Um-Cf-Ams-Ufs-Um | |
| B1593- | Gfs-Ams-Gf-Um-Cf-Gm-Af- | 270/72 | Ums-Ufs-Um-Cf-Cm-Af-Gm-Cf- | 356/158 |
| AL | Cm-Uf-Um-Uf-Gm-Af-Gm- | | Um-Cf-Am-Af-Am-Gf-Um-Cf- | |
| | Cf-Um-Gf-Gm-Af-Am-Af | | Gm-Af-Cm-Uf-Cms-Afs-Um | |
| B1596- | Ufs-Cms-Gf-Am-Cf-Um-Uf- | 271/73 | Ums-Gfs-Cm-Uf-Um-Uf-Cm-Cf- | 357/159 |
| AL | Um-Gf-Am-Gf-Cm-Uf-Gm- | | Am-Gf-Cm-Uf-Cm-Af-Am-Af- | |
| | Gf-Am-Af-Am-Gf-Cm-Af | | Gm-Uf-Cm-Gf-Ams-Cfs-Um | |
| B1602- | Ufs-Ums-Gf-Am-Gf-Cm-Uf- | 272/74 | Ams-Afs-Cm-Gf-Gm-Cf-Um-Gf- | 358/160 |
| AL | Gm-Gf-Am-Af-Am-Gf-Cm- | | Cm-Uf-Um-Uf-Cm-Cf-Am-Gf- | |
| | Af-Gm-Cf-Cm-Gf-Um-Uf | | Cm-Uf-Cm-Af-Ams-Afs-Gm | |
| B1603- | Ufs-Gms-Af-Gm-Cf-Um-Gf- | 273/75 | Ams-Afs-Am-Cf-Gm-Gf-Cm-Uf- | 359/161 |
| AL | Gm-Af-Am-Af-Gm-Cf-Am- | | Gm-Cf-Um-Uf-Um-Cf-Cm-Af- | |
| | Gf-Cm-Cf-Gm-Uf-Um-Uf | | Gm-Cf-Um-Cf-Ams-Afs-Am | |
| B1608- | Ufs-Gms-Gf-Am-Af-Am-Gf- | 274/76 | Ams-Gfs-Gm-Af-Gm-Af-Am-Af- | 360/162 |
| AL | Cm-Af-Gm-Cf-Cm-Gf-Um- | | Cm-Gf-Gm-Cf-Um-Gf-Cm-Uf- | |
| | Uf-Um-Cf-Um-Cf-Cm-Uf | | Um-Uf-Cm-Cf-Ams-Gfs-Cm | |
| B1612- | Afs-Ams-Gf-Cm-Af-Gm-Cf- | 275/77 | Ams-Cfs-Cm-Af-Am-Gf-Gm-Af- | 361/163 |
| AL | Cm-Gf-Um-Uf-Um-Cf-Um- | | Gm-Af-Am-Af-Cm-Gf-Gm-Cf- | |
| | Cf-Cm-Uf-Um-Gf-Gm-Uf | | Um-Gf-Cm-Uf-Ums-Ufs-Cm | |
| B1775- | Cfs-Ams-Af-Cm-Cf-Gm-Af- | 276/78 | Ums-Afs-Cm-Af-Am-Af-Cm-Af- | 362/164 |
| AL | Cm-Cf-Am-Gf-Cm-Uf-Um- | | Am-Gf-Cm-Uf-Gm-Gf-Um-Cf- | |
| | Gf-Um-Uf-Um-Gf-Um-Af | | Gm-Gf-Um-Uf-Gms-Gfs-Am | |
| B1790- | Ufs-Ums-Uf-Gm-Uf-Gm-Af- | 277/79 | Ams-Afs-Cm-Af-Cm-Uf-Um-Uf- | 363/165 |
| AL | Am-Af-Cm-Af-Am-Af-Am- | | Um-Uf-Um-Gf-Um-Uf-Um-Cf- | |
| | Af-Am-Gf-Um-Gf-Um-Uf | | Am-Cf-Am-Af-Ams-Cfs-Am | |
| B1796- | Afs-Ams-Af-Cm-Af-Am-Af- | 278/80 | Ams-Afs-Am-Gf-Gm-Gf-Am-Af- | 364/166 |
| AL | Am-Af-Am-Gf-Um-Gf-Um- | | Cm-Af-Cm-Uf-Um-Uf-Um-Uf- | |
| | Uf-Cm-Cf-Cm-Uf-Um-Uf | | Um-Gf-Um-Uf-Ums-Cfs-Am | |
| B1798s- | Ams-Cfs-Am-Af-Am-Af- | 279/81 | Ams-Afs-Am-Af-Gm-Gf-Gm-Af- | 365/167 |
| AL | Am-Af-Gm-Uf-Gm-Uf-Um- | | Am-Cf-Am-Cf-Um-Uf-Um-Uf- | |
| | Cf-Cm-Cf-Um-Uf-Um-Uf | | Um-Uf-Gm-Ufs-Ums-Uf | |
| B1799- | Cfs-Ams-Af-Am-Af-Am-Af- | 280/82 | Ums-Gfs-Am-Af-Am-Af-Gm-Gf- | 366/168 |
| AL | Gm-Uf-Gm-Uf-Um-Cf-Cm- | | Gm-Af-Am-Cf-Am-Cf-Um-Uf- | |
| | Cf-Um-Uf-Um-Uf-Cm-Af | | Um-Uf-Um-Uf-Gms-Ufs-Um | |
| B1810- | Ufs-Cms-Cf-Cm-Uf-Um-Uf- | 281/83 | Ums-Gfs-Um-Uf-Cm-Uf-Cm-Af- | 367/169 |
| AL | Um-Cf-Am-Af-Gm-Uf-Um- | | Am-Cf-Um-Uf-Gm-Af-Am-Af- | |
| | Gf-Am-Gf-Am-Af-Cm-Af | | Am-Gf-Gm-Gf-Ams-Afs-Cm | |
| B1811- | Cfs-Cms-Cf-Um-Uf-Um-Uf- | 282/84 | Ums-Ufs-Gm-Uf-Um-Cf-Um-Cf- | 368/170 |
| AL | Cm-Af-Am-Gf-Um-Uf-Gm- | | Am-Af-Cm-Uf-Um-Gf-Am-Af- | |
| | Af-Gm-Af-Am-Cf-Am-Af | | Am-Af-Gm-Gf-Gms-Afs-Am | |
| B1814- | Ufs-Ums-Uf-Um-Cf-Am-Af- | 283/85 | Ums-Ufs-Um-Uf-Um-Gf-Um-Uf- | 369/171 |
| AL | Gm-Uf-Um-Gf-Am-Gf-Am- | | Cm-Uf-Cm-Af-Am-Cf-Um-Uf- | |
| | Af-Cm-Af-Am-Af-Am-Af | | Gm-Af-Am-Af-Ams-Gfs-Gm | |
| B1815- | Ufs-Ums-Uf-Cm-Af-Am-Gf- | 284/86 | Ams-Ufs-Um-Uf-Um-Uf-Gm-Uf- | 370/172 |
| AL | Um-Uf-Gm-Af-Gm-Af-Am- | | Um-Cf-Um-Cf-Am-Af-Cm-Uf- | |
| | Cf-Am-Af-Am-Af-Am-Uf | | Um-Gf-Am-Af-Ams-Afs-Gm | |
| B1817- | Ufs-Cms-Af-Am-Gf-Um-Uf- | 285/87 | Cms-Afs-Am-Uf-Um-Uf-Um-Uf- | 371/173 |
| AL | Gm-Af-Gm-Af-Am-Cf-Am- | | Gm-Uf-Um-Cf-Um-Cf-Am-Af- | |
| | Af-Am-Af-Am-Uf-Um-Gf | | Cm-Uf-Um-Gf-Ams-Afs-Am | |
| B1828- | Afs-Cms-Af-Am-Af-Am-Af- | 286/88 | Ams-Ufs-Um-Uf-Um-Af-Am-Af- | 372/174 |
| AL | Um-Uf-Gm-Gf-Gm-Uf-Um- | | Am-Cf-Cm-Cf-Am-Af-Um-Uf- | |
| | Uf-Um-Af-Am-Af-Am-Uf | | Um-Uf-Um-Gf-Ums-Ufs-Cm | |
| B1838s- | Gms-Gfs-Um-Uf-Um-Uf- | 287/89 | Ums-Afs-Um-Af-Cm-Uf-Um-Uf- | 373/175 |
| AL | Am-Af-Am-Af-Um-Uf-Am- | | Am-Af-Um-Uf-Um-Uf-Am-Af- | |
| | Af-Am-Gf-Um-Af-Um-Af | | Am-Af-Cm-Cfs-Cms-Af | |
| B2018- | Afs-Ums-Af-Gm-Cf-Um-Gf- | 288/90 | Ams-Afs-Gm-Gf-Gm-Af-Gm-Af- | 374/176 |
| AL | Gm-Uf-Um-Af-Um-Uf-Um- | | Am-Af-Um-Af-Am-Cf-Cm-Af- | |
| | Cf-Um-Cf-Cm-Cf-Um-Uf | | Gm-Cf-Um-Af-Ums-Gfs-Gm | |
| B2020- | Afs-Gms-Cf-Um-Gf-Gm-Uf- | 289/91 | Ams-Cfs-Am-Af-Gm-Gf-Gm-Af- | 375/177 |
| AL | Um-Af-Um-Uf-Um-Cf-Um- | | Gm-Af-Am-Af-Um-Af-Am-Cf- | |
| | Cf-Cm-Cf-Um-Uf-Gm-Uf | | Cm-Af-Gm-Cf-Ums-Afs-Um | |
| B2025- | Gfs-Ums-Uf-Am-Uf-Um-Uf- | 290/92 | Ums-Ufs-Am-Af-Cm-Af-Cm-Af- | 376/178 |
| AL | Cm-Uf-Cm-Cf-Cm-Uf-Um- | | Am-Gf-Gm-Gf-Am-Gf-Am-Af- | |
| | Gf-Um-Gf-Um-Uf-Am-Af | | Am-Uf-Am-Af-Cms-Cfs-Am | |
| B2030- | Ufs-Ums-Cf-Um-Cf-Cm-Cf- | 291/93 | Ums-Afs-Um-Uf-Am-Cf-Um-Af- | 377/179 |
| AL | Um-Uf-Gm-Uf-Gm-Uf-Um- | | Am-Cf-Am-Cf-Am-Af-Gm-Gf- | |
| | Af-Gm-Uf-Am-Af-Um-Af | | Gm-Af-Gm-Af-Ams-Afs-Um | |
| B2031- | Ufs-Cms-Uf-Cm-Cf-Cm-Uf- | 292/94 | Ums-Ufs-Am-Uf-Um-Af-Cm-Uf- | 378/180 |
| AL | Um-Gf-Um-Gf-Um-Uf-Am- | | Am-Af-Cm-Af-Cm-Af-Am-Gf- | |
| | Gf-Um-Af-Am-Uf-Am-Af | | Gm-Gf-Am-Gf-Ams-Afs-Am | |
| B2032- | Cfs-Ums-Cf-Cm-Cf-Um-Uf- | 293/95 | Ums-Ufs-Um-Af-Um-Uf-Am-Cf- | 379/181 |
| AL | Gm-Uf-Gm-Uf-Um-Af-Gm- | | Um-Af-Am-Cf-Am-Cf-Am-Af- | |
| | Uf-Am-Af-Um-Af-Am-Af | | Gm-Gf-Gm-Af-Gms-Afs-Am | |
| B2033- | Ufs-Cms-Cf-Cm-Uf-Um-Gf- | 294/96 | Ums-Ufs-Um-Uf-Am-Uf-Um-Af- | 380/182 |
| AL | Um-Gf-Um-Uf-Am-Gf-Um- | | Cm-Uf-Am-Af-Cm-Af-Cm-Af- | |
| | Af-Am-Uf-Am-Af-Am-Af | | Am-Gf-Gm-Gf-Ams-Gfs-Am | |
| B729-AL | Afs-Gms-Af-Am-Cf-Um-Gf- | 295/97 | Ums-Cfs-Am-Gf-Cm-Af-Gm-Cf- | 381/183 |
| | Gm-Af-Um-Gf-Um-Uf-Gm- | | Am-Af-Cm-Af-Um-Cf-Cm-Af- | |
| | Cf-Um-Gf-Cm-Uf-Gm-Af | | Gm-Uf-Um-Cf-Ums-Gfs-Um | |
| B731-AL | Um-Gf-Um-Uf-Gm-Cf-Um- | 296/98 | Ums-Cfs-Um-Cf-Am-Gf-Cm-Af- | 382/184 |
| | Afs-Ams-Cf-Um-Gf-Gm-Af- | | Gm-Cf-Am-Af-Cm-Af-Um-Cf- | |
| | Gf-Cm-Uf-Gm-Af-Gm-Af | | Cm-Af-Gm-Uf-Ums-Cfs-Um | |
| B732-AL | Afs-Cms-Uf-Gm-Gf-Am-Uf- | 297/99 | Ums-Ufs-Cm-Uf-Cm-Af-Gm-Cf- | 383/185 |
| | Gm-Uf-Um-Gf-Cm-Uf-Gm- | | Am-Gf-Cm-Af-Am-Cf-Am-Uf- | |
| | Cf-Um-Gf-Am-Gf-Am-Af | | Cm-Cf-Am-Gf-Ums-Ufs-Cm | |
| B734-AL | Ufs-Gms-Gf-Am-Uf-Gm-Uf- | 298/100 | Ums-Cfs-Um-Uf-Cm-Uf-Cm-Af- | 384/186 |
| | Um-Gf-Cm-Uf-Gm-Cf-Um- | | Gm-Cf-Am-Gf-Cm-Af-Am-Cf- | |
| | Gf-Am-Gf-Am-Af-Gm-Af | | Am-Uf-Cm-Cf-Ams-Gfs-Um | |
| B734s- | Ums-Gfs-Gm-Af-Um-Gf- | 299/101 | Ums-Ufs-Um-Cf-Um-Cf-Am-Gf- | 385/187 |
| AL | Um-Uf-Gm-Cf-Um-Gf-Cm- | | Cm-Af-Gm-Cf-Am-Af-Cm-Af- | |
| | Uf-Gm-Af-Gm-Af-Am-Af | | Um-Cf-Cm-Afs-Gms-Uf | |
| B736-AL | Gfs-Ams-Uf-Gm-Uf-Um-Gf- | 300/102 | Ams-Afs-Um-Cf-Um-Uf-Cm-Uf- | 386/188 |
| | Cm-Uf-Gm-Cf-Um-Gf-Am- | | Cm-Af-Gm-Cf-Am-Gf-Cm-Af- | |
| | Gf-Am-Af-Gm-Af-Um-Uf | | Am-Cf-Am-Uf-Cms-Cfs-Am | |
| B743-AL | Cfs-Ums-Gf-Cm-Uf-Gm-Af- | 301/103 | Ams-Cfs-Cm-Uf-Gm-Uf-Cm-Af- | 387/189 |
| | Gm-Af-Am-Gf-Am-Uf-Um- | | Am-Uf-Cm-Uf-Um-Cf-Um-Cf- | |
| | Gf-Am-Cf-Am-Gf-Gm-Uf | | Am-Gf-Cm-Af-Gms-Cfs-Am | |
| B753s- | Gms-Afs-Um-Uf-Gm-Af- | 302/104 | Ums-Cfs-Um-Gf-Cm-Af-Um-Gf- | 388/190 |
| AL | Cm-Af-Gm-Gf-Um-Uf-Cm- | | Am-Af-Cm-Cf-Um-Gf-Um-Cf- | |
| | Af-Um-Gf-Cm-Af-Gm-Af | | Am-Af-Um-Cfs-Ums-Uf | |
| B963-AL | Gfs-Cms-Af-Cm-Uf-Gm-Gf- | 303/105 | Ums-Cfs-Cm-Uf-Gm-Gf-Am-Uf- | 389/191 |
| | Am-Gf-Um-Gf-Am-Cf-Am- | | Gm-Uf-Cm-Af-Cm-Uf-Cm-Cf- | |
| | Uf-Cm-Cf-Am-Gf-Gm-Af | | Am-Gf-Um-Gf-Cms-Ufs-Gm | |
| B966-AL | Cfs-Ums-Gf-Gm-Af-Gm-Uf- | 304/106 | Ums-Ufs-Gm-Uf-Cm-Cf-Um-Gf- | 390/192 |
| | Gm-Af-Cm-Af-Um-Cf-Cm- | | Gm-Af-Um-Gf-Um-Cf-Am-Cf- | |
| | Af-Gm-Gf-Am-Cf-Am-Af | | Um-Cf-Cm-Af-Gms-Ufs-Gm | |
| B969-AL | Gfs-Ams-Gf-Um-Gf-Am-Cf- | 305/107 | Ams-Afs-Gm-Uf-Um-Gf-Um-Cf- | 391/193 |
| | Am-Uf-Cm-Cf-Am-Gf-Gm- | | Cm-Uf-Gm-Gf-Am-Uf-Gm-Uf- | |
| | Af-Cm-Af-Am-Cf-Um-Uf | | Cm-Af-Cm-Uf-Cms-Cfs-Am | |
| B971-AL | Gfs-Ums-Gf-Am-Cf-Am-Uf- | 306/108 | Ams-Gfs-Am-Af-Gm-Uf-Um-Gf- | 392/194 |
| | Cm-Cf-Am-Gf-Gm-Af-Cm- | | Um-Cf-Cm-Uf-Gm-Gf-Am-Uf- | |
| | Af-Am-Cf-Um-Uf-Cm-Uf | | Gm-Uf-Cm-Af-Cms-Ufs-Cm | |
| B982-AL | Gfs-Ams-Cf-Am-Af-Cm-Uf- | 307/109 | Ums-Ufs-Gm-Af-Gm-Uf-Cm-Af- | 393/195 |
| | Um-Cf-Um-Cf-Gm-Gf-Um- | | Cm-Cf-Gm-Af-Gm-Af-Am-Gf- | |
| | Gf-Am-Cf-Um-Cf-Am-Af | | Um-Uf-Gm-Uf-Cms-Cfs-Um | |
| B984-AL | Cfs-Ams-Af-Cm-Uf-Um-Cf- | 308/110 | Ams-Cfs-Um-Uf-Gm-Af-Gm-Uf- | 394/196 |
| | Um-Cf-Gm-Gf-Um-Gf-Am- | | Cm-Af-Cm-Cf-Gm-Af-Gm-Af- | |
| | Cf-Um-Cf-Am-Af-Gm-Uf | | Am-Gf-Um-Uf-Gms-Ufs-Cm | |
| B992-AL | Cfs-Gms-Gf-Um-Gf-Am-Cf- | 309/111 | Ums-Gfs-Am-Af-Gm-Gf-Gm-Cf- | 395/197 |
| | Um-Cf-Am-Af-Gm-Uf-Gm- | | Am-Cf-Um-Uf-Gm-Af-Gm-Uf- | |
| | Cf-Cm-Cf-Um-Uf-Cm-Af | | Cm-Af-Cm-Cf-Gms-Afs-Gm | |
| B994-AL | Gfs-Ums-Gf-Am-Cf-Um-Cf- | 310/112 | Ams-Gfs-Um-Gf-Am-Af-Gm-Gf- | 396/198 |
| | Am-Af-Gm-Uf-Gm-Cf-Cm- | | Gm-Cf-Am-Cf-Um-Uf-Gm-Af- | |
| | Cf-Um-Uf-Cm-Af-Cm-Uf | | Gm-Uf-Cm-Af-Cms-Cfs-Gm | |

### Example 2: Inhibition of Alternately Modified Sequences on AGT Gene Expression

[0296] After the siRNA sequences alternately modified with 2′-OMe and 2′-F synthesized in Example 1 were transfected into HepG2 cells via lipid nanoparticles (LNPs), the inhibitory effects of these sequences on the AGT gene were tested using qPCR technology.

### 1. Experimental Materials

[0297] Test samples: the alternately modified siRNA sequences listed in Table 1 (synthesized in Example 1).
[0298] Cell type: HepG2 cell line.
[0299] Drug vehicle: sterile nuclease-free water, Gibco Opti-MEM.

### 2. Experimental Methods

[0300] The inhibitory effects of the test samples on the mRNA expression of AGT genes in HepG2 cell lines were tested by qRT-PCR.

### 2.1 Cell Culture

[0301] HepG2 cells in the logarithmic growth phase were harvested from subcultured stocks and cultured in DMEM medium containing 10% fetal bovine serum (supplemented with 100× penicillin and 100× streptomycin at 10 μL/mL). The cells were incubated in a cell culture incubator at 37° C. with 5% CO₂, with medium replaced daily. For subculture, the cells were digested with 0.25% trypsin, centrifuged at 800 rpm for 3 minutes, and the supernatant was discarded. Fresh medium was added for subculture.

### 2.2 Cell Transfection

[0302] Preparation of transfection mixture: Lipofectamine RNAiMAX and Opti-MEM were mixed at a ratio of 2:98 and vortexed thoroughly.

[0303] Preparation of transfection reagent: 65 μL of siRNA solution diluted in Opti-MEM was mixed with 65 μL of the prepared transfection mixture at a ratio of 1:1 (v/v), vortexed thoroughly, and the mixture was incubated at room temperature for 15 minutes to obtain lipid nanoparticles (LNPs). A 12.5 μL aliquot was taken for encapsulation efficiency analysis.

[0304] Blank control transfection reagent: 65 μL of the prepared transfection mixture was added to 65 μL of Opti-MEM, vortexed thoroughly, and the mixture was incubated at room temperature for 15 minutes.

[0305] The prepared transfection reagent was added to a 24-well cell culture plate (100 μL per well), resulting in a final siRNA concentration of 0.07 nM per well. 500 μL of cell suspension (1.5×10⁵ cells per mL) was added per well. After mixing by crosswise method, the plate was incubated in a cell culture incubator at 37° C. with 5% CO₂ for 40 hours.

2.3 AGT mRNA Assay

### 1) RNA Extraction

[0306] a. The culture medium was aspirated from the 12-well plate, and the cells were washed with 0.5 mL of 1×PBS per well, followed by aspiration of the PBS. 0.5 mL of TRIzol reagent was added per well, and the cells were fully lysed by pipetting. The lysate was transferred to a 1.5 mL RNase-free EP tube and incubated at room temperature for 5 minutes.
[0307] b. 0.1 mL of chloroform was added per tube, followed by vigorous vortexing for 15 seconds and incubation at room temperature for 5 minutes. The mixture was centrifuged at 12,000×g for 15 minutes at 4° C., and 200 μL of the supernatant was transferred to a new EP tube.
[0308] c. An equal volume of isopropanol was added, and the liquid in the tube was gently mixed by inversion. The mixture was incubated at −20° C. for 10 minutes, followed by centrifugation at 12,000×g for 15 minutes at 4° C., and the supernatant was discarded.
[0309] d. The RNA pellet was gently washed with 0.5 mL of 75% ethanol, followed by centrifugation at 12,000×g for 5 minutes at 4° C., and the supernatant was aspirated. The washing step was repeated once, followed by centrifugation at 12,000×g for 1 minute at 4° C., and residual ethanol was completely removed with a micropipette tip.
[0310] e. The RNA pellet was air-dried at room temperature for 2 to 3 minutes to remove residual ethanol, and dissolved in 40 μL of RNase-free ddH₂O.

### 2) RNA Concentration Measurement

[0311] RNA concentration was measured using a NanoDrop spectrophotometer. 2 μL of RNase-free ddH₂O was used as a blank control, and 2 μL of each RNA sample was loaded for measurement. The sample concentration was recorded.

3) Reverse Transcription of AGT mRNA

[0312] Reverse transcription reagent, RNA solution, and water were mixed at a volume ratio of 2:5:3. The mixture was reacted in a PCR instrument at 37° C. for 15 minutes and 85° C. for 5 seconds, and finally maintained at 4° C. The resulting cDNA was diluted 5-fold using sterile nuclease-free water.

4) Quantitative Analysis of AGT mRNA

[0313] In a 15 mL centrifuge tube, qPCR reagent, forward primer, and reverse primer were mixed at a volume ratio of 5:0.1:0.1, labeled as Solution A.

[0314] In a pre-labeled 1.5 mL EP tube, diluted cDNA and water were mixed at a volume ratio of 1:3.8, labeled as Solution B.

[0315] In a 96-well PCR plate, 5.2 μL of Solution A and 4.8 μL of Solution B were added per well. The plate was sealed with a sealing film, centrifuged at 3000 rpm for 1 minute, and loaded for qPCR analysis.
[0316] All operations in this section were performed on ice to maintain low-temperature conditions.

[0317] The plate was placed in a qPCR instrument and run according to the following program:
[0318] Pre-denaturation: 95° C. for 30 seconds;
[0319] Cycling reaction: 95° C. for 5 seconds; 60° C. for 34 seconds; 40 cycles;
[0320] Melting curve: 95° C. for 15 seconds; 60° C. for 60 seconds; 95° C. for 15 seconds.

[0321] The total run time was approximately 2 hours. Experimental results were analyzed, and 2^{-ΔΔCt} was calculated.

### 2.4 Data Processing

[0322] AGT mRNA expression rate (%) was calculated using the following formula:

Expression rate=(AGT mRNA expression level/AGT mRNA expression level in blank control group)×100%;

Inhibition rate of AGT gene expression=100%−expression rate (%).

### 3. Experimental Results

[0323] In this example, the inhibition rate represents the average value of three independent experiments. The inhibition rates of AGT mRNA expression in HepG2 cells by specific sequences are shown in Tables 2 to 5.

[0324] The experimental results demonstrated that some sequences alternately modified with 2′-OMe and 2′-F, including sequence B1789-AL, exhibited significant inhibitory effects on AGT mRNA expression in HepG2 cells, with inhibition rates exceeding 45%. Specifically,B1576s-AL exhibited an inhibition rate exceeding 600.

[0325] The remaining sequences exhibited poor inhibitory effects on AGT mRNA expression, with inhibition rates below 4500.
[0326] (1) Among the 99 designed sequences, 33 sequences exhibited significant inhibitory effects on the AGT gene, with inhibition rates exceeding 40%. Some of these sequences exhibited inhibition rates exceeding 60%.

TABLE 2
Alternately modified sequences with significant inhibitory
effects on AGT gene expression (inhibition rate > 40%)

| Unmodified | Alternately modified | Inhibition |
|---|---|---|
| sequence ID | sequence ID | rate (%) |
| 1576s | B1576s-AL | 64.6 |
| 1578s | B1578s-AL | 63.9 |
| 1838 | B1838-AL | 63.6 |
| 1789 | B1789-AL | 63.5 |
| 1812 | B1812-AL | 62.9 |
| 1835 | B1835-AL | 62.3 |
| 1791 | B1791-AL | 61.8 |
| 1579 | B1579-AL | 61.1 |
| 1816 | B1816-AL | 60.9 |
| 1790 | B1790-AL | 60.3 |
| 1836 | B1836-AL | 59.8 |
| 1585s | B1585s-AL | 59.3 |
| 1839 | B1839-AL | 59.1 |
| 1838s | B1838s-AL | 58.4 |
| 1796 | B1796-AL | 57.9 |
| 1795 | B1795-AL | 57.5 |
| 1817 | B1817-AL | 57.3 |
| 734s | B734s-AL | 56.4 |
| 1798s | B1798s-AL | 54.4 |
| 736 | B736-AL | 53.3 |
| 1608 | B1608-AL | 52.5 |
| 1282 | B1282-AL | 51.8 |
| 1811 | B1811-AL | 51.5 |
| 1281 | B1281-AL | 50.4 |
| 1799 | B1799-AL | 49.2 |
| 1603 | B1603-AL | 48.6 |
| 1828 | B1828-AL | 46.6 |
| 1592 | B1592-AL | 44.4 |
| 1814 | B1814-AL | 43.2 |
| 1593 | B1593-AL | 42.4 |
| 1810 | B1810-AL | 42.1 |
| 1365 | B1365-AL | 42.0 |
| 1279 | B1279-AL | 41.4 |

[0327] As shown in Table 2, the alternately modified sequences in the above table (with specific sequences listed in Table 1) exhibited significant inhibitory effects on AGIT mRNA expression, with inhibition rates of 40% or more. Specifically, the top 10 sequences exhibited inhibition rates exceeding 60% (FIG. 1).

[0328] The sequences of the compounds in Table 2 are listed in Table 3 below.

TABLE 3
siRNA sequences with significant inhibitory effects on AGT gene expression

| | | Sequence SEQ | | Sequence SEQ |
|---|---|---|---|---|
| | | ID NO./ | | ID NO./ |
| | | corresponding | | corresponding |
| | | unmodified | | unmodified |
| Sequence | Sense strand | sequence SEQ | Antisense strand | sequence SEQ |
| ID | sequence 5′-3′ | ID NO. | sequence 5′-3′ | ID NO. |
| B1576s-AL | Cms-Cfs-Am-Cf-Cm-Uf- | 209/11 | Ums-Ufs-Cm-Af-Um-Uf- | 222/24 |
| | Um-Uf-Um-Cf-Um-Uf- | | Am-Gf-Am-Af-Gm-Af-Am- | |
| | Cm-Uf-Am-Af-Um-Gf- | | Af-Am-Gf-Gm-Uf-Gm-Gfs- | |
| | Am-Af | | Gms-Af | |
| B1578s-AL | Ams-Cfs-Cm-Uf-Um-Uf- | 210/12 | Ums-Afs-Cm-Uf-Cm-Af- | 223/25 |
| | Um-Cf-Um-Uf-Cm-Uf- | | Um-Uf-Am-Gf-Am-Af-Gm- | |
| | Am-Af-Um-Gf-Am-Gf- | | Af-Am-Af-Am-Gf-Gm-Ufs- | |
| | Um-Af | | Gms-Gf | |
| B1838-AL | Gfs-Gms-Uf-Um-Uf-Um- | 211/13 | Ums-Ufs-Am-Uf-Am-Cf- | 224/26 |
| | Af-Am-Af-Am-Uf-Um- | | Um-Uf-Um-Af-Am-Uf-Um- | |
| | Af-Am-Af-Gm-Uf-Am- | | Uf-Um-Af-Am-Af-Am-Cf- | |
| | Uf-Am-Af | | Cms-Cfs-Am | |
| B1789-AL | Gfs-Ums-Uf-Um-Gf-Um- | 204/6 | Ams-Cfs-Am-Cf-Um-Uf- | 217/19 |
| | Gf-Am-Af-Am-Cf-Am- | | Um-Uf-Um-Uf-Gm-Uf-Um- | |
| | Af-Am-Af-Am-Af-Gm- | | Uf-Cm-Af-Cm-Af-Am-Af- | |
| | Uf-Gm-Uf | | Cms-Afs-Am | |
| B1812-AL | Cfs-Cms-Uf-Um-Uf-Um- | 201/3 | Ums-Ufs-Um-Gf-Um-Uf- | 214/16 |
| | Cf-Am-Af-Gm-Uf-Um- | | Cm-Uf-Cm-Af-Am-Cf-Um- | |
| | Gf-Am-Gf-Am-Af-Cm- | | Uf-Gm-Af-Am-Af-Am-Gf- | |
| | Af-Am-Af | | Gms-Gfs-Am | |
| B1835-AL | Ufs-Ums-Gf-Gm-Gf-Um- | 199/1 | Ums-Afs-Cm-Uf-Um-Uf- | 212/14 |
| | Uf-Um-Uf-Am-Af-Am- | | Am-Af-Um-Uf-Um-Uf-Am- | |
| | Af-Um-Uf-Am-Af-Am- | | Af-Am-Af-Cm-Cf-Cm-Af- | |
| | Gf-Um-Af | | Ams-Ufs-Um | |
| B1791-AL | Ufs-Ums-Gf-Um-Gf-Am- | 206/8 | Ums-Afs-Am-Cf-Am-Cf- | 219/21 |
| | Af-Am-Cf-Am-Af-Am- | | Um-Uf-Um-Uf-Um-Uf-Gm- | |
| | Af-Am-Af-Gm-Uf-Gm- | | Uf-Um-Uf-Cm-Af-Cm-Af- | |
| | Uf-Um-Af | | Ams-Afs-Cm | |
| B1579-AL | Cfs-Cms-Uf-Um-Uf-Um- | 202/4 | Ums-Cfs-Gm-Af-Cm-Uf- | 215/17 |
| | Cf-Um-Uf-Cm-Uf-Am- | | Cm-Af-Um-Uf-Am-Gf-Am- | |
| | Af-Um-Gf-Am-Gf-Um- | | Af-Gm-Af-Am-Af-Am-Gf- | |
| | Cf-Gm-Af | | Gms-Ufs-Gm | |
| B1816-AL | Ufs-Ums-Cf-Am-Af-Gm- | 200/2 | Ams-Afs-Um-Uf-Um-Uf- | 213/15 |
| | Uf-Um-Gf-Am-Gf-Am- | | Um-Gf-Um-Uf-Cm-Uf-Cm- | |
| | Af-Cm-Af-Am-Af-Am- | | Af-Am-Cf-Um-Uf-Gm-Af- | |
| | Af-Um-Uf | | Ams-Afs-Am | |
| B1790-AL | Ufs-Ums-Uf-Gm-Uf-Gm- | 277/79 | Ams-Afs-Cm-Af-Cm-Uf- | 363/165 |
| | Af-Am-Af-Cm-Af-Am- | | Um-Uf-Um-Uf-Um-Gf-Um- | |
| | Af-Am-Af-Am-Gf-Um- | | Uf-Um-Cf-Am-Cf-Am-Af- | |
| | Gf-Um-Uf | | Ams-Cfs-Am | |
| B1836-AL | Ufs-Gms-Gf-Gm-Uf-Um- | 203/5 | Ams-Ufs-Am-Cf-Um-Uf- | 216/18 |
| | Uf-Um-Af-Am-Af-Am- | | Um-Af-Am-Uf-Um-Uf-Um- | |
| | Uf-Um-Af-Am-Af-Gm- | | Af-Am-Af-Am-Cf-Cm-Cf- | |
| | Uf-Am-Uf | | Ams-Afs-Um | |
| B1585s-AL | Cms-Ufs-Um-Cf-Um-Af- | 208/10 | Ums-Afs-Am-Af-Gm-Uf- | 221/23 |
| | Am-Uf-Gm-Af-Gm-Uf- | | Cm-Gf-Am-Cf-Um-Cf-Am- | |
| | Cm-Gf-Am-Cf-Um-Uf- | | Uf-Um-Af-Gm-Af-Am-Gfs- | |
| | Um-Af | | Ams-Af | |
| B1839-AL | Gfs-Ums-Uf-Um-Uf-Am- | 205/7 | Ums-Gfs-Um-Af-Um-Af- | 218/20 |
| | Af-Am-Af-Um-Uf-Am- | | Cm-Uf-Um-Uf-Am-Af-Um- | |
| | Af-Am-Gf-Um-Af-Um- | | Uf-Um-Uf-Am-Af-Am-Af- | |
| | Af-Cm-Af | | Cms-Cfs-Cm | |
| B1838s-AL | Gms-Gfs-Um-Uf-Um-Uf- | 287/89 | Ums-Afs-Um-Af-Cm-Uf- | 373/175 |
| | Am-Af-Am-Af-Um-Uf- | | Um-Uf-Am-Af-Um-Uf-Um- | |
| | Am-Af-Am-Gf-Um-Af- | | Uf-Am-Af-Am-Af-Cm-Cfs- | |
| | Um-Af | | Cms-Af | |
| B1796-AL | Afs-Ams-Af-Cm-Af-Am- | 278/80 | Ams-Afs-Am-Gf-Gm-Gf- | 364/166 |
| | Af-Am-Af-Am-Gf-Um- | | Am-Af-Cm-Af-Cm-Uf-Um- | |
| | Gf-Um-Uf-Cm-Cf-Cm- | | Uf-Um-Uf-Um-Gf-Um-Uf- | |
| | Uf-Um-Uf | | Ums-Cfs-Am | |
| B1795-AL | Gfs-Ams-Af-Am-Cf-Am- | 207/9 | Ams-Afs-Gm-Gf-Gm-Af- | 220/22 |
| | Af-Am-Af-Am-Af-Gm- | | Am-Cf-Am-Cf-Um-Uf-Um- | |
| | Uf-Gm-Uf-Um-Cf-Cm- | | Uf-Um-Uf-Gm-Uf-Um-Uf- | |
| | Cf-Um-Uf | | Cms-Afs-Cm | |
| B1817-AL | Ufs-Cms-Af-Am-Gf-Um- | 285/87 | Cms-Afs-Am-Uf-Um-Uf- | 371/173 |
| | Uf-Gm-Af-Gm-Af-Am- | | Um-Uf-Gm-Uf-Um-Cf-Um- | |
| | Cf-Am-Af-Am-Af-Am- | | Cf-Am-Af-Cm-Uf-Um-Gf- | |
| | Uf-Um-Gf | | Ams-Afs-Am | |
| B734s-AL | Ums-Gfs-Gm-Af-Um-Gf- | 299/101 | Ums-Ufs-Um-Cf-Um-Cf- | 385/187 |
| | Um-Uf-Gm-Cf-Um-Gf- | | Am-Gf-Cm-Af-Gm-Cf-Am- | |
| | Cm-Uf-Gm-Af-Gm-Af- | | Af-Cm-Af-Um-Cf-Cm-Afs- | |
| | Am-Af | | Gms-Uf | |
| B1798s-AL | Ams-Cfs-Am-Af-Am-Af- | 279/81 | Ams-Afs-Am-Af-Gm-Gf- | 365/167 |
| | Am-Af-Gm-Uf-Gm-Uf- | | Gm-Af-Am-Cf-Am-Cf-Um- | |
| | Um-Cf-Cm-Cf-Um-Uf- | | Uf-Um-Uf-Um-Uf-Gm-Ufs- | |
| | Um-Uf | | Ums-Uf | |
| B736-AL | Gfs-Ams-Uf-Gm-Uf-Um- | 300/102 | Ams-Afs-Um-Cf-Um-Uf- | 386/188 |
| | Gf-Cm-Uf-Gm-Cf-Um- | | Cm-Uf-Cm-Af-Gm-Cf-Am- | |
| | Gf-Am-Gf-Am-Af-Gm- | | Gf-Cm-Af-Am-Cf-Am-Uf- | |
| | Af-Um-Uf | | Cms-Cfs-Am | |
| B1608-AL | Ufs-Gms-Gf-Am-Af-Am- | 274/76 | Ams-Gfs-Gm-Af-Gm-Af- | 360/162 |
| | Gf-Cm-Af-Gm-Cf-Cm- | | Am-Af-Cm-Gf-Gm-Cf-Um- | |
| | Gf-Um-Uf-Um-Cf-Um- | | Gf-Cm-Uf-Um-Uf-Cm-Cf- | |
| | Cf-Cm-Uf | | Ams-Gfs-Cm | |
| B1282-AL | Afs-Gms-Cf-Am-Uf-Um- | 254/56 | Ums-Ufs-Cm-Af-Am-Gf- | 340/142 |
| | Uf-Um-Uf-Um-Uf-Um- | | Cm-Uf-Cm-Af-Am-Af-Am- | |
| | Gf-Am-Gf-Cm-Uf-Um- | | Af-Am-Af-Am-Uf-Gm-Cf- | |
| | Gf-Am-Af | | Ums-Gfs-Um | |
| B1811-AL | Cfs-Cms-Cf-Um-Uf-Um- | 282/84 | Ums-Ufs-Gm-Uf-Um-Cf- | 368/170 |
| | Uf-Cm-Af-Am-Gf-Um- | | Um-Cf-Am-Af-Cm-Uf-Um- | |
| | Uf-Gm-Af-Gm-Af-Am- | | Gf-Am-Af-Am-Af-Gm-Gf- | |
| | Cf-Am-Af | | Gms-Afs-Am | |
| B1281-AL | Cfs-Ams-Gf-Cm-Af-Um- | 253/55 | Ums-Cfs-Am-Af-Gm-Cf- | 339/141 |
| | Uf-Um-Uf-Um-Uf-Um- | | Um-Cf-Am-Af-Am-Af-Am- | |
| | Uf-Gm-Af-Gm-Cf-Um- | | Af-Am-Af-Um-Gf-Cm-Uf- | |
| | Uf-Gm-Af | | Gms-Ufs-Um | |
| B1799-AL | Cfs-Ams-Af-Am-Af-Am- | 280/82 | Ums-Gfs-Am-Af-Am-Af- | 366/168 |
| | Af-Gm-Uf-Gm-Uf-Um- | | Gm-Gf-Gm-Af-Am-Cf-Am- | |
| | Cf-Cm-Cf-Um-Uf-Um- | | Cf-Um-Uf-Um-Uf-Um-Uf- | |
| | Uf-Cm-Af | | Gms-Ufs-Um | |
| B1603-AL | Ufs-Gms-Af-Gm-Cf-Um- | 273/75 | Ams-Afs-Am-Cf-Gm-Gf- | 359/161 |
| | Gf-Gm-Af-Am-Af-Gm- | | Cm-Uf-Gm-Cf-Um-Uf-Um- | |
| | Cf-Am-Gf-Cm-Cf-Gm- | | Cf-Cm-Af-Gm-Cf-Um-Cf- | |
| | Uf-Um-Uf | | Ams-Afs-Am | |
| B1828-AL | Afs-Cms-Af-Am-Af-Am- | 286/88 | Ams-Ufs-Um-Uf-Um-Af- | 372/174 |
| | Af-Um-Uf-Gm-Gf-Gm- | | Am-Af-Am-Cf-Cm-Cf-Am- | |
| | Uf-Um-Uf-Um-Af-Am- | | Af-Um-Uf-Um-Uf-Um-Gf- | |
| | Af-Am-Uf | | Ums-Ufs-Cm | |
| B1592-AL | Ufs-Gms-Af-Gm-Uf-Cm- | 269/71 | Ums-Ufs-Cm-Cf-Am-Gf- | 355/157 |
| | Gf-Am-Cf-Um-Uf-Um- | | Cm-Uf-Cm-Af-Am-Af-Gm- | |
| | Gf-Am-Gf-Cm-Uf-Gm- | | Uf-Cm-Gf-Am-Cf-Um-Cf- | |
| | Gf-Am-Af | | Ams-Ufs-Um | |
| B1814-AL | Ufs-Ums-Uf-Um-Cf-Am- | 283/85 | Ums-Ufs-Um-Uf-Um-Gf- | 369/171 |
| | Af-Gm-Uf-Um-Gf-Am- | | Um-Uf-Cm-Uf-Cm-Af-Am- | |
| | Gf-Am-Af-Cm-Af-Am- | | Cf-Um-Uf-Gm-Af-Am-Af- | |
| | Af-Am-Af | | Ams-Gfs-Gm | |
| B1593-AL | Gfs-Ams-Gf-Um-Cf-Gm- | 270/72 | Ums-Ufs-Um-Cf-Cm-Af- | 356/158 |
| | Af-Cm-Uf-Um-Uf-Gm- | | Gm-Cf-Um-Cf-Am-Af-Am- | |
| | Af-Gm-Cf-Um-Gf-Gm- | | Gf-Um-Cf-Gm-Af-Cm-Uf- | |
| | Af-Am-Af | | Cms-Afs-Um | |
| B1810-AL | Ufs-Cms-Cf-Cm-Uf-Um- | 281/83 | Ums-Gfs-Um-Uf-Cm-Uf- | 367/169 |
| | Uf-Um-Cf-Am-Af-Gm- | | Cm-Af-Am-Cf-Um-Uf-Gm- | |
| | Uf-Um-Gf-Am-Gf-Am- | | Af-Am-Af-Am-Gf-Gm-Gf- | |
| | Af-Cm-Af | | Ams-Afs-Cm | |
| B1365-AL | Gfs-Ams-Cf-Cm-Cf-Um- | 256/58 | Ams-Gfs-Gm-Af-Am-Uf- | 342/144 |
| | Gf-Am-Af-Cm-Cf-Gm- | | Gm-Gf-Gm-Cf-Gm-Gf-Um- | |
| | Cf-Cm-Cf-Am-Uf-Um- | | Uf-Cm-Af-Gm-Gf-Gm-Uf- | |
| | Cf-Cm-Uf | | Cms-Afs-Cm | |
| B1279-AL | Afs-Ams-Cf-Am-Gf-Cm- | 252/54 | Ams-Afs-Gm-Cf-Um-Cf- | 338/140 |
| | Af-Um-Uf-Um-Uf-Um- | | Am-Af-Am-Af-Am-Af-Am- | |
| | Uf-Um-Uf-Gm-Af-Gm- | | Af-Um-Gf-Cm-Uf-Gm-Uf- | |
| | Cf-Um-Uf | | Ums-Cfs-Am | |

[0329] (2) A total of 23 sequences exhibited inhibition rates ranging from 25% to 40% on the AGT gene. For example, the inhibition rates of B734-AL and B994-AL were 39.2% and 37.3%, respectively.

TABLE 4
Alternately modified sequences with inhibition rates
ranging from 25% to 40% on AGT gene expression

| Unmodified sequence ID | Sequence ID | Inhibition rate (%) |
|---|---|---|
| 734 | B734-AL | 39.2 |
| 1591 | B1591-AL | 37.9 |
| 969 | B969-AL | 37.3 |
| 994 | B994-AL | 37.3 |
| 984 | B984-AL | 36.9 |
| 743 | B743-AL | 33.8 |
| 1393 | B1393-AL | 33.4 |
| 2030 | B2030-AL | 33.0 |
| 1267 | B1267-AL | 31.5 |
| 2033 | B2033-AL | 31.5 |
| 2031 | B2031-AL | 31.0 |
| 1815 | B1815-AL | 30.4 |
| 2020 | B2020-AL | 30.4 |
| 753s | B753s-AL | 30.2 |
| 2032 | B2032-AL | 30.2 |
| 1602 | B1602-AL | 29.0 |
| 1029 | B1029-AL | 28.6 |
| 1612 | B1612-AL | 28.6 |
| 2018 | B2018-AL | 27.9 |
| 2025 | B2025-AL | 26.6 |
| 731 | B731-AL | 26.4 |
| 1011 | B1011-AL | 26.2 |
| 732 | B732-AL | 25.4 |

[0330] The 22 sequences listed in Table 4 exhibited poor inhibitory effects on the AGT gene, with inhibition rates below 4000, ranging from 25% to 40%. For example, the inhibition rates of B734-AL and B994-AL were 39.2% and 37.3%, respectively (FIG. 2).

[0331] (3) A total of 43 sequences exhibited inhibition rates below 25% on the AGT gene. For example, the inhibition rate of B1017-AL was only 23.1%.

TABLE 5
Alternately modified sequences with inhibition
rates below 25% on AGT gene expression

| Unmodified sequence ID | Sequence ID | Inhibition rate (%) |
|---|---|---|
| 1030 | B1030-AL | 23.5 |
| 1017 | B1017-AL | 23.1 |
| 992 | B992-AL | 20.5 |
| 1362 | B1362-AL | 17.5 |
| 1061 | B1061-AL | 17.1 |
| 982 | B982-AL | 17.1 |
| 729 | B729-AL | 16.4 |
| 1020 | B1020-AL | 16.3 |
| 1775 | B1775-AL | 15.5 |
| 1596 | B1596-AL | 15.0 |
| 971 | B971-AL | 15.0 |
| 1057 | B1057-AL | 14.8 |
| 1268 | B1268-AL | 14.2 |
| 1564 | B1564-AL | 13.8 |
| 1028 | B1028-AL | 10.4 |
| 1065s | B1065s-AL | 10.0 |
| 1024 | B1024-AL | 9.9 |
| 1044 | B1044-AL | 9.9 |
| 963 | B963-AL | 9.8 |
| 1266 | B1266-AL | 8.2 |
| 1014 | B1014-AL | 6.5 |
| 1047 | B1047-AL | 6.4 |
| 1041 | B1041-AL | 6.0 |
| 1008 | B1008-AL | 5.6 |
| 966 | B966-AL | 4.8 |
| 1046 | B1046-AL | 4.5 |
| 1071 | B1071-AL | 4.1 |
| 1038 | B1038-AL | 3.9 |
| 1016 | B1016-AL | 3.5 |
| 1026 | B1026-AL | 3.4 |
| 1554 | B1554-AL | 1.7 |
| 1367 | B1367-AL | 1.6 |
| 1407 | B1407-AL | 1.3 |
| 1260 | B1260-AL | 0.9 |
| 1558 | B1558-AL | 0.9 |
| 1401 | B1401-AL | −0.6 |
| 1053 | B1053-AL | −1.6 |
| 1561 | B1561-AL | −2.0 |
| 1404 | B1404-AL | −2.4 |
| 1369 | B1369-AL | −2.8 |
| 1562 | B1562-AL | −3.3 |
| 1262 | B1262-AL | −6.0 |
| 1265 | B1265-AL | −8.8 |

[0332] The 43 sequences listed in Table 5 exhibited very poor inhibitory effects on AGT mRNA expression, with inhibition rates below 2500. For example, the inhibition rate of B1017-AL was only 23.1% (FIG. 3 and FIG. 4).

[0333] (4) siRNAs with similar sequences exhibited significant differences inactivity. For example, the inhibition rate of B1365-AL was 40.4% higher than that of B1367-AL, indicating a significant improvement.

[0334] A comparison of the inhibitory effects on AGT mRNA by some siRNAs with similar sequences is shown in Table 6.

TABLE 6
Comparison of inhibition rates of siRNAs with similar sequences on AGT gene
expression

| | | | Corresponding | Corresponding | Corresponding | Corresponding | |
|---|---|---|---|---|---|---|---|
| Similar | | | unmodified | unmodified | unmodified | unmodified | |
| sequence | Unmodified | Sequence | sense | sequence SEQ | antisense | sequence SEQ | Inhibition |
| group | sequence ID | ID | strand 5′-3′ | ID NO. | strand 5′-3′ | ID NO. | rate (%) |
| A | 1367 | B1367- | CCCUGAACCGC | 59 | ACAGGAAUGGGC | 145 | 1.6 |
| | | AL | CCAUUCCUGU | | GGUUCAGGGUC | | |
| | 1365 | B1365- | GACCCUGAACC | 58 | AGGAAUGGGCGG | 144 | 42.0 |
| | | AL | GCCCAUUCCU | | UUCAGGGUCAC | | |
| B | 1815 | B1815- | UUUCAAGUUGA | 86 | AUUUUUGUUCUC | 172 | 30.4 |
| | | AL | GAACAAAAAU | | AACUUGAAAAG | | |
| | 1816 | B1816- | UUCAAGUUGAG | 2 | AAUUUUUGUUCU | 15 | 60.9 |
| | | AL | AACAAAAAUU | | CAACUUGAAAA | | |
| C | 729 | B729-AL | AGAACUGGAUG | 97 | UCAGCAGCAACA | 183 | 16.4 |
| | | | UUGCUGCUGA | | UCCAGUUCUGU | | |
| | 734s | B734s- | UGGAUGUUGCU | 101 | UUUCUCAGCAGC | 187 | 56.4 |
| | | AL | GCUGAGAAA | | AACAUCCAGU | | |

[0335] As shown in Table 6, some siRNAs with similar sequences exhibited significantly different inhibitory effects on AGT mRNA expression.

[0336] Unmodified sequence 1367 differs from unmodified sequence 1365 by only 2 terminal bases. For the sense strand, the 5′ end of unmodified sequence 58 is GA, while the 3′ end of unmodified sequence 59 is GU, with all other sequences being identical. For the antisense strand, the 3′ end of unmodified sequence 144 is AC, while the 5′ end of unmodified sequence 145 is AC, with all other sequences being identical. However, the inhibition rate of alternately modified sequence B1365-AL was 40.4% higher than that of B1367-AL, indicating a significant improvement.

[0337] Unmodified sequence 1815 differs from unmodified sequence 1816 by only 1 terminal base. For the sense strand, the 5′ end of unmodified sequence 86 is U, while the 3′ end of sequence 2 is U, with all other sequences being identical. For the antisense strand, the 3′ end of unmodified sequence 172 is G, while the 5′ end of unmodified sequence 15 is A, with all other sequences being identical. However, the inhibition rate of alternately modified sequence B1816-AL was 30.5% higher than that of B1815-AL, indicating a significant improvement.

[0338] Unmodified sequence 729 differs from unmodified sequence 734s by only 5 terminal bases. For the sense strand, the 5′ end of unmodified sequence 97 is AGAAC, while the 3′ end of unmodified sequence 101 is GAAA, with all other sequences being identical. For the antisense strand, the 3′ end of unmodified sequence 183 is UCUGU, while the 5′ end of unmodified sequence 187 is UUUC, with all other sequences being identical. However, the inhibition rate of alternately modified sequence B734s-AL was 40.0% higher than that of B729-AL, indicating a significant improvement.

[0339] Therefore, screening oligonucleotide sequences with significant inhibitory activity from a vast number of candidate sequences designed for AGT mRNA sequences is not straightforward and requires substantial creative effort.

### SUMMARY

[0340] (1) Among the 99 designed sequences, 33 sequences exhibited significant inhibitory effects on the AGT gene, with inhibition rates exceeding 40%. Specifically, 10 sequences exhibited inhibition rates exceeding 60%.
[0341] (2) A total of 23 sequences exhibited inhibition rates ranging from 25% to 40% on the AGT gene. For example, the inhibition rates of B734-AL and B994-AL were 39.2% and 37.3%, respectively.
[0342] (3) A total of 43 sequences exhibited inhibition rates below 25% on the AGT gene. For example, the inhibition rate of B1017-AL was only 23.1%.
[0343] (4) siRNAs with similar sequences exhibited significant differences in activity. For example, the inhibition rate of B1365-AL was 40.4% higher than that of B1367-AL, indicating a significant improvement. Therefore, screening oligonucleotide sequences with significant inhibitory activity from a vast number of candidate sequences designed for AGT mRNA sequences is not straightforward and requires substantial creative effort.

### Example 3: Inhibition of Unmodified Sequences on AGT Gene Expression

[0344] In this example, some unmodified sequences corresponding to the modified sequences in Example 2 were synthesized and transfected into HepG2 cells via lipid nanoparticles (LNPs). The inhibitory effects of these unmodified sequences on the AGT gene were tested using qPCR technology to screen unmodified siRNA sequences with favorable inhibitory effects.

### 1. Experimental Materials

### Test Samples:

[0345] The unmodified siRNA sequences listed in Table 7.

### 2. Synthesis of Unmodified Sequence 1579

[0346] The siRNA sequence designated as 1579 in Table 7 is as follows:

(SEQ ID NO: 4)
Sense strand: 5′-CCUUUUCUUCUAAUGAGUCGA-3′
(SEQ ID NO: 17)
Antisense strand: 5′-UCGACUCAUUAGAAGAAAAGGUG-3′

[0347] Instruments and reagents: A Tsingke 192 P model DNA/RNA automatic synthesizer was used. The solid-phase support was a universal support composed of cross-linked polystyrene beads, model: Primer Support 5G Unylinker 350 (manufactured by Cytiva).

### Preparation Method:

[0348] Nucleoside phosphoramidite monomer solutions were prepared in acetonitrile at a concentration of 0.15 M, using the following monomers: DMT-A-2′-O-TBDMS phosphoramidite monomer (Formula 11), DMT-C-2′-O-TBDMS phosphoramidite monomer (Formula 12), DMT-G-2′-O-TBDMS phosphoramidite monomer (Formula 13), and DMT-U-2′-O-TBDMS phosphoramidite monomer (Formula 14).

[chemical structure]

[0349] The preparation was carried out according to the following steps:

[0350] The solid-phase support was loaded into the designated position of the synthesizer, and a corresponding fully protected product was obtained through several synthesis cycles, each cycle including (1) deprotection, (2) coupling, (3) oxidation/sulfurization, and (4) hydroxyl protection. The cycle process and the reagents used are described as follows:

### (1) Deprotection

[0351] 3% dichloroacetic acid in toluene was used as a deprotection reagent to remove the DMT protecting group, followed by washing with acetonitrile.

### (2) Coupling

[0352] Each nucleoside phosphoramidite monomer in acetonitrile was coupled using 0.25 M 5-ethylthio-1H-tetrazole as an activator, followed by rinsing with acetonitrile.

### (3) Oxidation/Sulfurization

[0353] Oxidation: 0.05 M iodine in pyridine/water (90/10) was used as an oxidant for oxidation, followed by rinsing with acetonitrile.

[0354] Sulfurization: 3% xanthane hydride in pyridine was used as a sulfurizing agent for sulfurization, followed by rinsing with acetonitrile.

### (4) Hydroxyl Protection

[0355] 10% acetic anhydride in tetrahydrofuran (CAP A) and tetrahydrofuran/pyridine/N-methylimidazole (74/10/16, v/v/v) (CAP B) were used as hydroxyl protecting reagents for hydroxyl protection, followed by rinsing with acetonitrile.

[0356] The above steps were repeated according to the set sequence to obtain the fully protected product.

(5) 3% dichloroacetic acid in toluene was used as a deprotection reagent to remove the DMT protecting group from the last nucleotide, followed by washing with acetonitrile.

### (6) Ammonolysis and Purification

[0357] The reacted solid-phase support was transferred to a reactor, then concentrated aqueous ammonia (25 to 28%) was added, and ammonolysis was performed at 60° C. for 12 hours. The system was then cooled to room temperature, and the mixture was transferred to a pressure filtration vessel, followed by rinsing with a mixture of purified water and ethanol. The filtrates were combined, subjected to column chromatography, concentrated, and lyophilized to obtain a 2′-O-TBDMS protected product.

### (7) Removal of TBDMS Protecting Groups

[0358] DMSO and triethylamine trihydrofluoride were added to the obtained product, and the mixture was reacted at 60° C. for 2 hours. An aqueous solution of ammonium acetate was then added to the reaction mixture and vortexed thoroughly. Anhydrous ethanol was then added, vortexed thoroughly, followed by crystallization at −20° C. for 8 to 12 hours. After centrifugation, the supernatant was discarded, and the precipitate was rinsed with anhydrous ethanol to obtain the unmodified single-stranded product.

### (8) Annealing

[0359] The resulting unmodified sense and antisense strands were mixed at a ratio of 1:1, heated to 95° C. and maintained for 3 minutes, and slowly cooled to room temperature to form an unmodified duplex.

[0360] Unmodified sequence 1579 had a purity of 97.4% and a measured molecular weight of 13990.9.

### 3. Synthesis of Other Sequences

[0361] The other sequences listed in Table 7 were synthesized according to the method described above.

TABLE 7
Unmodified siRNA sequences

| | Sense strand sequence | SEQ | Antisense strand | |
|---|---|---|---|---|
| Sequence | (unmodified | ID | sequence (unmodified | SEQ |
| ID | sequence) 5′-3′ | NO. | sequence) 5′-3′ | ID NO. |
| 1835 | UUGGGUUUUAAAAUUAAAGUA | 1 | UACUUUAAUUUUAAAACCCAAUU | 14 |
| 1816 | UUCAAGUUGAGAACAAAAAUU | 2 | AAUUUUUGUUCUCAACUUGAAAA | 15 |
| 1812 | CCUUUUCAAGUUGAGAACAAA | 3 | UUUGUUCUCAACUUGAAAAGGGA | 16 |
| 1579 | CCUUUUCUUCUAAUGAGUCGA | 4 | UCGACUCAUUAGAAGAAAAGGUG | 17 |
| 1836 | UGGGUUUUAAAAUUAAAGUAU | 5 | AUACUUUAAUUUUAAAACCCAAU | 18 |
| 1789 | GUUUGUGAAACAAAAAAGUGU | 6 | ACACUUUUUUGUUUCACAAACAA | 19 |
| 1839 | GUUUUAAAAUUAAAGUAUACA | 7 | UGUAUACUUUAAUUUUAAAACCC | 20 |
| 1791 | UUGUGAAACAAAAAAGUGUUA | 8 | UAACACUUUUUUGUUUCACAAAC | 21 |
| 1795 | GAAACAAAAAAGUGUUCCCUU | 9 | AAGGGAACACUUUUUUGUUUCAC | 22 |
| 1585s | CUUCUAAUGAGUCGACUUUA | 10 | UAAAGUCGACUCAUUAGAAGAA | 23 |
| 1576s | CCACCUUUUCUUCUAAUGAA | 11 | UUCAUUAGAAGAAAAGGUGGGA | 24 |
| 1578s | ACCUUUUCUUCUAAUGAGUA | 12 | UACUCAUUAGAAGAAAAGGUGG | 25 |
| 1838 | GGUUUUAAAAUUAAAGUAUAA | 13 | UUAUACUUUAAUUUUAAAACCCA | 26 |
| 1008 | CUUCACUGAGAGCGCCUGCCU | 27 | AGGCAGGCGCUCUCAGUGAAGGG | 113 |
| 1011 | CACUGAGAGCGCCUGCCUGCU | 28 | AGCAGGCAGGCGCUCUCAGUGAA | 114 |
| 1014 | UGAGAGCGCCUGCCUGCUGCU | 29 | AGCAGCAGGCAGGCGCUCUCAGU | 115 |
| 1016 | AGAGCGCCUGCCUGCUGCUGA | 30 | UCAGCAGCAGGCAGGCGCUCUCA | 116 |
| 1017 | GAGCGCCUGCCUGCUGCUGAU | 31 | AUCAGCAGCAGGCAGGCGCUCUC | 117 |
| 1020 | CGCCUGCCUGCUGCUGAUCCA | 32 | UGGAUCAGCAGCAGGCAGGCGCU | 118 |
| 1024 | UGCCUGCUGCUGAUCCAGCCU | 33 | AGGCUGGAUCAGCAGCAGGCAGG | 119 |
| 1026 | CCUGCUGCUGAUCCAGCCUCA | 34 | UGAGGCUGGAUCAGCAGCAGGCA | 120 |
| 1028 | UGCUGCUGAUCCAGCCUCACU | 35 | AGUGAGGCUGGAUCAGCAGCAGG | 121 |
| 1029 | GCUGCUGAUCCAGCCUCACUA | 36 | UAGUGAGGCUGGAUCAGCAGCAG | 122 |
| 1030 | CUGCUGAUCCAGCCUCACUAU | 37 | AUAGUGAGGCUGGAUCAGCAGCA | 123 |
| 1038 | CCAGCCUCACUAUGCCUCUGA | 38 | UCAGAGGCAUAGUGAGGCUGGAU | 124 |
| 1041 | GCCUCACUAUGCCUCUGACCU | 39 | AGGUCAGAGGCAUAGUGAGGCUG | 125 |
| 1044 | UCACUAUGCCUCUGACCUGGA | 40 | UCCAGGUCAGAGGCAUAGUGAGG | 126 |
| 1046 | ACUAUGCCUCUGACCUGGACA | 41 | UGUCCAGGUCAGAGGCAUAGUGA | 127 |
| 1047 | CUAUGCCUCUGACCUGGACAA | 42 | UUGUCCAGGUCAGAGGCAUAGUG | 128 |
| 1053 | CUCUGACCUGGACAAGGUGGA | 43 | UCCACCUUGUCCAGGUCAGAGGC | 129 |
| 1057 | GACCUGGACAAGGUGGAGGGU | 44 | ACCCUCCACCUUGUCCAGGUCAG | 130 |
| 1061 | UGGACAAGGUGGAGGGUCUCA | 45 | UGAGACCCUCCACCUUGUCCAGG | 131 |
| 1065s | CAAGGUGGAGGGUCUCACUU | 46 | AAGUGAGACCCUCCACCUUGUC | 132 |
| 1071 | GGAGGGUCUCACUUUCCAGCA | 47 | UGCUGGAAAGUGAGACCCUCCAC | 133 |
| 1260 | CAGGGUGGGGGAGGUGCUGAA | 48 | UUCAGCACCUCCCCCACCCUGAU | 134 |
| 1262 | GGGUGGGGGAGGUGCUGAACA | 49 | UGUUCAGCACCUCCCCCACCCUG | 135 |
| 1265 | UGGGGGAGGUGCUGAACAGCA | 50 | UGCUGUUCAGCACCUCCCCCACC | 136 |
| 1266 | GGGGGAGGUGCUGAACAGCAU | 51 | AUGCUGUUCAGCACCUCCCCCAC | 137 |
| 1267 | GGGGAGGUGCUGAACAGCAUU | 52 | AAUGCUGUUCAGCACCUCCCCCA | 138 |
| 1268 | GGGAGGUGCUGAACAGCAUUU | 53 | AAAUGCUGUUCAGCACCUCCCCC | 139 |
| 1279 | AACAGCAUUUUUUUUGAGCUU | 54 | AAGCUCAAAAAAAAUGCUGUUCA | 140 |
| 1281 | CAGCAUUUUUUUUGAGCUUGA | 55 | UCAAGCUCAAAAAAAAUGCUGUU | 141 |
| 1282 | AGCAUUUUUUUUGAGCUUGAA | 56 | UUCAAGCUCAAAAAAAAUGCUGU | 142 |
| 1362 | GGUGACCCUGAACCGCCCAUU | 57 | AAUGGGCGGUUCAGGGUCACCUC | 143 |
| 1365 | GACCCUGAACCGCCCAUUCCU | 58 | AGGAAUGGGCGGUUCAGGGUCAC | 144 |
| 1367 | CCCUGAACCGCCCAUUCCUGU | 59 | ACAGGAAUGGGCGGUUCAGGGUC | 145 |
| 1369 | CUGAACCGCCCAUUCCUGUUU | 60 | AAACAGGAAUGGGCGGUUCAGGG | 146 |
| 1393 | GUGUAUGAUCAAAGCGCCACU | 61 | AGUGGCGCUUUGAUCAUACACAG | 147 |
| 1401 | UCAAAGCGCCACUGCCCUGCA | 62 | UGCAGGGCAGUGGCGCUUUGAUC | 148 |
| 1404 | AAGCGCCACUGCCCUGCACUU | 63 | AAGUGCAGGGCAGUGGCGCUUUG | 149 |
| 1407 | CGCCACUGCCCUGCACUUCCU | 64 | AGGAAGUGCAGGGCAGUGGCGCU | 150 |
| 1554 | GCGAUGUGUCACCCCCAGUCU | 65 | AGACUGGGGGUGACACAUCGCUG | 151 |
| 1558 | UGUGUCACCCCCAGUCUCCCA | 66 | UGGGAGACUGGGGGUGACACAUC | 152 |
| 1561 | GUCACCCCCAGUCUCCCACCU | 67 | AGGUGGGAGACUGGGGGUGACAC | 153 |
| 1562 | UCACCCCCAGUCUCCCACCUU | 68 | AAGGUGGGAGACUGGGGGUGACA | 154 |
| 1564 | ACCCCCAGUCUCCCACCUUUU | 69 | AAAAGGUGGGAGACUGGGGGUGA | 155 |
| 1591 | AUGAGUCGACUUUGAGCUGGA | 70 | UCCAGCUCAAAGUCGACUCAUUA | 156 |
| 1592 | UGAGUCGACUUUGAGCUGGAA | 71 | UUCCAGCUCAAAGUCGACUCAUU | 157 |
| 1593 | GAGUCGACUUUGAGCUGGAAA | 72 | UUUCCAGCUCAAAGUCGACUCAU | 158 |
| 1596 | UCGACUUUGAGCUGGAAAGCA | 73 | UGCUUUCCAGCUCAAAGUCGACU | 159 |
| 1602 | UUGAGCUGGAAAGCAGCCGUU | 74 | AACGGCUGCUUUCCAGCUCAAAG | 160 |
| 1603 | UGAGCUGGAAAGCAGCCGUUU | 75 | AAACGGCUGCUUUCCAGCUCAAA | 161 |
| 1608 | UGGAAAGCAGCCGUUUCUCCU | 76 | AGGAGAAACGGCUGCUUUCCAGC | 162 |
| 1612 | AAGCAGCCGUUUCUCCUUGGU | 77 | ACCAAGGAGAAACGGCUGCUUUC | 163 |
| 1775 | CAACCGACCAGCUUGUUUGUA | 78 | UACAAACAAGCUGGUCGGUUGGA | 164 |
| 1790 | UUUGUGAAACAAAAAAGUGUU | 79 | AACACUUUUUUGUUUCACAAACA | 165 |
| 1796 | AAACAAAAAAGUGUUCCCUUU | 80 | AAAGGGAACACUUUUUUGUUUCA | 166 |
| 1798s | ACAAAAAAGUGUUCCCUUUU | 81 | AAAAGGGAACACUUUUUUGUUU | 167 |
| 1799 | CAAAAAAGUGUUCCCUUUUCA | 82 | UGAAAAGGGAACACUUUUUUGUU | 168 |
| 1810 | UCCCUUUUCAAGUUGAGAACA | 83 | UGUUCUCAACUUGAAAAGGGAAC | 169 |
| 1811 | CCCUUUUCAAGUUGAGAACAA | 84 | UUGUUCUCAACUUGAAAAGGGAA | 170 |
| 1814 | UUUUCAAGUUGAGAACAAAAA | 85 | UUUUUGUUCUCAACUUGAAAAGG | 171 |
| 1815 | UUUCAAGUUGAGAACAAAAAU | 86 | AUUUUUGUUCUCAACUUGAAAAG | 172 |
| 1817 | UCAAGUUGAGAACAAAAAUUG | 87 | CAAUUUUUGUUCUCAACUUGAAA | 173 |
| 1828 | ACAAAAAUUGGGUUUUAAAAU | 88 | AUUUUAAAACCCAAUUUUUGUUC | 174 |
| 1838s | GGUUUUAAAAUUAAAGUAUA | 89 | UAUACUUUAAUUUUAAAACCCA | 175 |
| 2018 | AUAGCUGGUUAUUUCUCCCUU | 90 | AAGGGAGAAAUAACCAGCUAUGG | 176 |
| 2020 | AGCUGGUUAUUUCUCCCUUGU | 91 | ACAAGGGAGAAAUAACCAGCUAU | 177 |
| 2025 | GUUAUUUCUCCCUUGUGUUAA | 92 | UUAACACAAGGGAGAAAUAACCA | 178 |
| 2030 | UUCUCCCUUGUGUUAGUAAUA | 93 | UAUUACUAACACAAGGGAGAAAU | 179 |
| 2031 | UCUCCCUUGUGUUAGUAAUAA | 94 | UUAUUACUAACACAAGGGAGAAA | 180 |
| 2032 | CUCCCUUGUGUUAGUAAUAAA | 95 | UUUAUUACUAACACAAGGGAGAA | 181 |
| 2033 | UCCCUUGUGUUAGUAAUAAAA | 96 | UUUUAUUACUAACACAAGGGAGA | 182 |
| 729 | AGAACUGGAUGUUGCUGCUGA | 97 | UCAGCAGCAACAUCCAGUUCUGU | 183 |
| 731 | AACUGGAUGUUGCUGCUGAGA | 98 | UCUCAGCAGCAACAUCCAGUUCU | 184 |
| 732 | ACUGGAUGUUGCUGCUGAGAA | 99 | UUCUCAGCAGCAACAUCCAGUUC | 185 |
| 734 | UGGAUGUUGCUGCUGAGAAGA | 100 | UCUUCUCAGCAGCAACAUCCAGU | 186 |
| 734s | UGGAUGUUGCUGCUGAGAAA | 101 | UUUCUCAGCAGCAACAUCCAGU | 187 |
| 736 | GAUGUUGCUGCUGAGAAGAUU | 102 | AAUCUUCUCAGCAGCAACAUCCA | 188 |
| 743 | CUGCUGAGAAGAUUGACAGGU | 103 | ACCUGUCAAUCUUCUCAGCAGCA | 189 |
| 753s | GAUUGACAGGUUCAUGCAGA | 104 | UCUGCAUGAACCUGUCAAUCUU | 190 |
| 963 | GCACUGGAGUGACAUCCAGGA | 105 | UCCUGGAUGUCACUCCAGUGCUG | 191 |
| 966 | CUGGAGUGACAUCCAGGACAA | 106 | UUGUCCUGGAUGUCACUCCAGUG | 192 |
| 969 | GAGUGACAUCCAGGACAACUU | 107 | AAGUUGUCCUGGAUGUCACUCCA | 193 |
| 971 | GUGACAUCCAGGACAACUUCU | 108 | AGAAGUUGUCCUGGAUGUCACUC | 194 |
| 982 | GACAACUUCUCGGUGACUCAA | 109 | UUGAGUCACCGAGAAGUUGUCCU | 195 |
| 984 | CAACUUCUCGGUGACUCAAGU | 110 | ACUUGAGUCACCGAGAAGUUGUC | 196 |
| 992 | CGGUGACUCAAGUGCCCUUCA | 111 | UGAAGGGCACUUGAGUCACCGAG | 197 |
| 994 | GUGACUCAAGUGCCCUUCACU | 112 | AGUGAAGGGCACUUGAGUCACCG | 198 |

[0362] Cell type: Hepatocellular carcinoma cell line HepG2 cells.

[0363] Drug vehicle: sterile nuclease-free water, Gibco Opti-MEM.

### 3. Experimental Methods

[0364] The experimental procedures and siRNA concentrations were referenced to Example 2.

### 4. Experimental Results

[0365] The inhibition rates of unmodified sequences on AGT mRNA expression are shown in Tables 8 and 9.

[0366] Unmodified sequences 1576s, 1578s, 1838, 1835, 1816, 1812, 1579, 1836, 1789, 1839, 1791, 1795, and 1585s exhibited significant inhibitory effects on AGT mRNA expression in HepG2 cells, with inhibition rates of 4500 or more. Specifically, 1576s, 1578s, 1838, 1835, 1812, 1579, and 1789 exhibited inhibition rates exceeding 5000. A comparison of the inhibitory effects between the unmodified sequences of the present disclosure and the sequences in the prior art is shown in Table 29.

[0367] (1) A total of 13 unmodified sequences exhibited significant inhibitory effects on the AGT gene, with inhibition rates exceeding 45%, including 1576s, 1578s, 1838, 1835, 1816, 1812, 1579, 1836, 1789, 1839, 1791, 1795, and 1585s. Specifically, 1576s, 1578s, 1838, 1835, 1812, 1579, and 1789 exhibited inhibition rates exceeding 50%.

TABLE 8
Unmodified sequences with significant inhibitory effects
on AGT gene expression (inhibition rate >45%)

| Sequence ID | Inhibition rate (%) |
|---|---|
| 1576s | 59.1 |
| 1578s | 55.2 |
| 1838 | 50.6 |
| 1835 | 51.6 |
| 1816 | 46.8 |
| 1812 | 56.8 |
| 1579 | 58.2 |
| 1836 | 46.5 |
| 1789 | 54.5 |
| 1839 | 45.7 |
| 1791 | 46.5 |
| 1795 | 49.6 |
| 1585s | 48.9 |

[0368] The unmodified sequences listed in Table 8, including 1576s, 1578s, 1838, 1835, 1816, 1812, 1579, 1836, 1789, 1839, 1791, 1795, and 1585s, exhibited significant inhibitory effects on AGT mRNA expression, with inhibition rates of 4500 or more. Specifically, 1576s, 1578s, 1838, 1835, 1812, 1579, and 1789 exhibited inhibition rates exceeding 5000 (FIG. 5).

[0369] (2) Some of the unmodified sequences exhibited inhibition rates below 45% on the AGT gene. For example, the inhibition rates of 731 and 1011 were only 1.3% and 2.1%, respectively.

TABLE 9
Unmodified sequences with inhibition rates
below 45% on AGT gene expression

| Sequence ID | Inhibition rate (%) |
|---|---|
| 1608 | 39.3 |
| 1811 | 37.7 |
| 1281 | 26.2 |
| 1799 | 34.9 |
| 1603 | 26.7 |
| 1828 | 31.5 |
| 1592 | 38.6 |
| 1593 | 41.6 |
| 1810 | 24.5 |
| 1365 | 24.3 |
| 1279 | 41.5 |
| 734 | 43.0 |
| 1591 | 37.4 |
| 969 | 27.3 |
| 994 | 36.6 |
| 984 | 31.6 |
| 743 | 29.3 |
| 1393 | 38.2 |
| 2030 | 36.3 |
| 1267 | 36.8 |
| 2033 | 34.9 |
| 2031 | 36.4 |
| 1815 | 37.1 |
| 2020 | 32.5 |
| 753s | 27.8 |
| 2032 | 17.6 |
| 1602 | 22.3 |
| 1029 | 18.5 |
| 1612 | 9.6 |
| 2018 | 14.1 |
| 2025 | 7.2 |
| 731 | 1.3 |
| 1011 | 2.1 |

[0370] The sequences listed in Table 9 exhibited very poor inhibitory effects on AGT mRNA expression, with inhibition rates below 45%. For example, the inhibition rates of 731 and 1011 were only 1.3% and 2.1%, respectively (FIG. 5).

[0371] (3) siRNAs with similar unmodified sequences exhibited significant differences in activity. For example, the inhibition rate of unmodified sequence 1812 was 32.3% higher than that of unmodified sequence 1810, indicating a significant improvement.

[0372] A comparison of the inhibitory effects on AGT mRNA by some siRNAs with similar sequences is shown in Table 10.

TABLE 10
Comparison of inhibition rates of unmodified sequences with similar
sequences on AGT gene expression

| | | | Unmodified | | Unmodified | |
|---|---|---|---|---|---|---|
| Similar | Base | Sense | sequence | | sequence | |
| sequence | sequence | strand | SEQ ID | Antisense | SEQ ID | Inhibition |
| group | ID | 5′-3′ | NO. | strand 5′-3′ | NO. | rate (%) |
| A | 1608 | UGGAAAGCAGC | 76 | AGGAGAAACGGC | 162 | 39.3 |
| | | CGUUUCUCCU | | UGCUUUCCAGC | | |
| | 1612 | AAGCAGCCGUU | 77 | ACCAAGGAGAAA | 163 | 9.6 |
| | | UCUCCUUGGU | | CGGCUGCUUUC | | |
| B | 2025 | GUUAUUUCUCCC | 92 | UUAACACAAGGG | 178 | 7.2 |
| | | UUGUGUUAA | | AGAAAUAACCA | | |
| | 2030 | UUCUCCCUUGU | 93 | UAUUACUAACACA | 179 | 36.3 |
| | | GUUAGUAAUA | | AGGGAGAAAU | | |
| C | 731 | AACUGGAUGUU | 98 | UCUCAGCAGCAA | 184 | 1.3 |
| | | GCUGCUGAGA | | CAUCCAGUUCU | | |
| | 734 | UGGAUGUUGCU | 100 | UCUUCUCAGCAG | 186 | 43.0 |
| | | GCUGAGAAGA | | CAACAUCCAGU | | |
| D | 1812 | CCUUUUCAAGU | 3 | UUUGUUCUCAAC | 16 | 56.8 |
| | | UGAGAACAAA | | UUGAAAAGGGA | | |
| | 1810 | UCCCUUUUCAAG | 83 | UGUUCUCAACUU | 169 | 24.5 |
| | | UUGAGAACA | | GAAAAGGGAAC | | |

[0373] As shown in Table 10, some siRNAs with similar sequences exhibited significantly different inhibitory effects on AGT mRNA expression.

[0374] Unmodified sequence 1608 differs from unmodified sequence 1612 by only 4 terminal bases. For the sense strand, the 5′ end of unmodified sequence 76 is UGGA, while the 3′ end of unmodified sequence 77 is UGGU, with all other sequences being identical. For the antisense strand, the 3′ end of unmodified sequence 162 is CAGC, while the 5′ end of unmodified sequence 163 is ACCA, with all other sequences being identical. However, the inhibition rate of unmodified sequence 1608 was 29.7% higher than that of 1612, indicating a significant improvement.

[0375] Unmodified sequence 2025 differs from unmodified sequence 2030 by only 6 terminal bases. For the sense strand, the 5′ end of unmodified sequence 92 is GUUAU and the 3′ end is A, while the 3′ end of sequence 93 is GUAAUA, with all other sequences being identical. For the antisense strand, the 3′ end of unmodified sequence 178 is AACCA and the 5′ end is U, while the 5′ end of unmodified sequence 179 is UAUUAC, with all other sequences being identical. However, the inhibition rate of unmodified sequence 2030 was 29.1% higher than that of 2025, indicating a significant improvement.

[0376] Unmodified sequence 731 differs from unmodified sequence 734 by only 3 terminal bases. For the sense strand, the 5′ end of unmodified sequence 98 is AAC, while the 3′ end of unmodified sequence 100 is AGA, with all other sequences being identical. For the antisense strand, the 3′ end of unmodified sequence 184 is UCU, while the 5′ end of unmodified sequence 186 is UCU, with all other sequences being identical. However, the inhibition rate of unmodified sequence 734 was 41.7% higher than that of 731, indicating a significant improvement.

[0377] Unmodified sequence 1812 differs from unmodified sequence 1810 by only 2 terminal bases. For the sense strand, the 3′ end of unmodified sequence 3 is AA, while the 5′ end of unmodified sequence 83 is UC, with all other sequences being identical. For the antisense strand, the 5′ end of unmodified sequence 16 is UU, while the 3′ end of unmodified sequence 169 is AC, with all other sequences being identical. The inhibition rate of unmodified sequence 1812 was 32.3% higher than that of unmodified sequence 1810, indicating a significant improvement.

[0378] Therefore, screening unmodified oligonucleotide sequences with significant inhibitory activity from a vast number of candidate sequences designed for AGT mRNA sequences is not straightforward and requires substantial creative effort.

[0379] (4) The effects of alternating modifications on activity enhancement varied across different sequences. For some sequences, the inhibition rate was significantly improved, e.g., unmodified sequence 731 exhibited a 25.1% increase in inhibition rate after alternating modification. For others, the improvement was minimal, e.g., unmodified sequences 994, 1279, and 1591 exhibited virtually no difference in inhibition rate between alternately modified and unmodified sequences.

TABLE 11
Comparison of inhibition rates between alternately modified
and unmodified sequences on AGT gene expression

| | | | % inhibition | |
|---|---|---|---|---|
| | % inhibition | Alternately | of alternately | Increase in |
| Sequence | of unmodified | modified | modified | inhibition |
| ID | sequences | sequence ID | sequences | rate/% |
| 731 | 1.3 | B731-AL | 26.4 | 25.1 |
| 734 | 43.0 | B734-AL | 39.2 | −3.8 |
| 743 | 29.3 | B743-AL | 33.8 | 4.5 |
| 753s | 27.8 | B753s-AL | 30.2 | 2.4 |
| 969 | 27.3 | B969-AL | 37.3 | 10.0 |
| 984 | 31.6 | B984-AL | 36.9 | 5.3 |
| 994 | 36.6 | B994-AL | 37.3 | 0.7 |
| 1011 | 2.1 | B1011-AL | 26.2 | 24.1 |
| 1029 | 18.5 | B1029-AL | 28.6 | 10.1 |
| 1267 | 36.8 | B1267-AL | 31.5 | −5.3 |
| 1279 | 41.5 | B1279-AL | 41.4 | −0.1 |
| 1281 | 26.2 | B1281-AL | 50.4 | 24.2 |
| 1365 | 24.3 | B1365-AL | 42.0 | 17.7 |
| 1393 | 38.2 | B1393-AL | 33.4 | −4.8 |
| 1576s | 59.1 | B1576s-AL | 64.6 | 5.5 |
| 1578s | 55.2 | B1578s-AL | 63.9 | 8.7 |
| 1579 | 58.2 | B1579-AL | 61.1 | 2.9 |
| 1585s | 48.9 | B1585s-AL | 59.3 | 10.4 |
| 1591 | 37.4 | B1591-AL | 37.9 | 0.5 |
| 1592 | 38.6 | B1592-AL | 44.4 | 5.8 |
| 1593 | 41.6 | B1593-AL | 42.4 | 0.8 |
| 1602 | 22.3 | B1602-AL | 29.0 | 6.7 |
| 1603 | 26.7 | B1603-AL | 48.6 | 21.9 |
| 1608 | 39.3 | B1608-AL | 52.5 | 13.2 |
| 1612 | 9.6 | B1612-AL | 28.6 | 19.0 |
| 1789 | 54.5 | B1789-AL | 63.5 | 9.0 |
| 1791 | 46.5 | B1791-AL | 61.8 | 15.3 |
| 1795 | 49.6 | B1795-AL | 57.5 | 7.9 |
| 1799 | 34.9 | B1799-AL | 49.2 | 14.3 |
| 1810 | 24.5 | B1810-AL | 42.1 | 17.6 |
| 1811 | 37.7 | B1811-AL | 51.5 | 13.8 |
| 1812 | 56.8 | B1812-AL | 62.9 | 6.1 |
| 1815 | 37.1 | B1815-AL | 30.4 | −6.7 |
| 1816 | 46.8 | B1816-AL | 60.9 | 14.1 |
| 1828 | 31.5 | B1828-AL | 46.6 | 15.1 |
| 1835 | 51.6 | B1835-AL | 62.3 | 10.7 |
| 1836 | 46.5 | B1836-AL | 59.8 | 13.3 |
| 1838 | 50.6 | B1838-AL | 63.6 | 13.0 |
| 1839 | 45.7 | B1839-AL | 59.1 | 13.4 |
| 2018 | 14.1 | B2018-AL | 27.9 | 13.8 |
| 2020 | 32.5 | B2020-AL | 30.4 | −2.1 |
| 2025 | 7.2 | B2025-AL | 26.6 | 19.4 |
| 2030 | 36.3 | B2030-AL | 33.0 | −3.3 |
| 2031 | 36.4 | B2031-AL | 31.0 | −5.4 |
| 2032 | 17.6 | B2032-AL | 30.2 | 12.6 |
| 2033 | 34.9 | B2033-AL | 31.5 | −3.4 |

[0380] As shown in Table 11, the effects of alternating modifications on AGT mRNA inhibition were not entirely consistent across different sequences. For some sequences, the inhibition rate was significantly improved, e.g., unmodified sequence 731 exhibited a 25.1% increase in inhibition rate after alternating modification. For others, the improvement was minimal, e.g., unmodified sequences 994, 1279, and 1591 exhibited virtually no difference in inhibition rate between alternately modified and unmodified sequences.

[0381] Therefore, not all unmodified sequences can exhibit a substantial increase in activity after alternating modifications, and the effect of alternating modifications on activity varies across different sequences.

### SUMMARY

[0382] (1) A total of 13 unmodified sequences exhibited significant inhibitory effects on the AGT gene, with inhibition rates exceeding 4500, including 1576s, 1579, 1812, 1578s, 1789, 1835, 1838, 1795, 1585s, 1816, 1791, 1836, and 1839. Specifically, 1576s, 1578s, 1812, 1579, 1789, 1835, and 1838 exhibited inhibition rates exceeding 5000.
[0383] (2) The other unmodified sequences exhibited inhibition rates below 4500 on the AGT gene. For example, the inhibition rates of 731 and 1011 were only 1.3% and 2.1%, respectively.
[0384] (3) siRNAs with similar sequences exhibited significant differences in activity. For example, the inhibition rate of unmodified sequence 734 was 41.70% higher than that of unmodified sequence 731, indicating a significant improvement.
[0385] (4) The effects of alternating modifications on activity varied across different sequences. For some sequences, the inhibition rate was significantly improved, e.g., unmodified sequence 731 exhibited a 25.1% increase in inhibition rate after alternating modification. For others, the improvement was minimal, e.g., unmodified sequences 994, 1279, and 1591 exhibited virtually no difference in inhibition rate between alternately modified and unmodified sequences.

### Example 4: Inhibition of Template-Modified Sequences on AGT Gene Expression

[0386] In this example, a total of 13 sequences screened in Example 3, namely unmodified sequences 1576s, 1578s, 1838, 1835, 1816, 1812, 1579, 1836, 1789, 1839, 1791, 1795, and 1585s, were modified using modification templates. Specifically, DV25P, DV26P, DV27P, DV28P, DV29P, DV32P, DV33P, and DV34P are novel modification templates designed in the present disclosure, while DV22 is a previously published Advanced ESC modification template (Foster, D. J., et al. (2018). “Advanced siRNA Designs Further Improve In Vivo Performance of GalNAc-siRNA Conjugates.” Mol Ther 26(3): 708-717).

[0387] Naturally 5′-phosphorylated or simply 5′-phosphorylated oligonucleotides may undergo dephosphorylation in cells. Directly 5′-phosphorylated oligonucleotide strands may undergo 90% dephosphorylation after 2 hours in circulation, and are completely dephosphorylated after 24 hours. The 5′-E-VP phosphorylation design, which utilizes E-vinylphosphonate to replace the bridging oxygen, offers improved phosphorylation effect and stability. In the modification templates DV25-29P and DV32-34P of the present disclosure, the antisense strands all incorporate the 5′-E-VP phosphorylation design.

### 1. Experimental Materials

### Test Samples:

[0388] The sequences listed in Table 12, including sequences 1576s, 1578s, 1838, 1835, 1816, 1812, 1579, 1836, 1789, 1839, 1791, 1795, and 1585s from Example 3 modified with different templates (DV25P, DV26P, DV27P, DV28P, DV29P, DV30P, DV32P, DV33P, DV34P, and DV22), as well as their corresponding alternately modified sequences B1576s-AL, B1578s-AL, B1838-AL, B1835-AL, B1816-AL, B1812-AL, B1579-AL, B1836-AL, B1789-AL, B1839-AL, B1791-AL, B1795-AL, and B1585s-AL (synthesized in Example 1).

### Synthesis of Sequences

[0389] The siRNA sequences were synthesized with reference to Example 1. During the synthesis of the base at the 5′ end of the antisense strand (the last base), a monomer containing a phosphonate group at the 5′ end was used, such as vinyl-(E)-phosphonate-A-OMe phosphoramidite monomer (Formula 9) or vinyl-(E)-phosphonate-U-OMe phosphoramidite monomer (Formula 10), the structures of which are as follows:

[chemical structure]

[0390] The modification principles for the templates in the present disclosure are as follows:

### DV22 and DV25-34P:

[0391] The antisense strand was modified according to one of the modification patterns shown in Table 46:

TABLE 46
Modification of antisense strand

| | Antisense strand (AS) 5′-3′ | | | | | | | | | | | |
|---|---|---|---|---|---|---|---|---|---|---|---|---|
| No. | 1 | 2 | 3 | 4 | 5 | 6 | 7 | 8 | 9 | 10 | 11 | 12 |
| A | 2′-OMe + | 2′-F + | 2′-OMe | 2′-OMe | 2′-OMe | 2′-F | 2′-OMe | 2′-OMe | 2′-OMe | 2′-OMe | 2′-OMe | 2′-OMe |
| | PS + EVP | PS | | | | | | | | | | |
| | 13 | 14 | 15 | 16 | 17 | 18 | 19 | 20 | 21 | 22 | 23 | |
| | 2′-OMe | 2′-F | 2′-OMe | 2′-F | 2′-OMe | 2′-OMe | 2′-OMe | 2′-OMe | 2′-OMe + | 2′-OMe + | 2′-OMe | |
| | | | | | | | | | PS | PS | | |
| | 1 | 2 | 3 | 4 | 5 | 6 | 7 | 8 | 9 | 10 | 11 | 12 |
| B | 2′-OMe + | 2′-F + | 2′-F | 2′-F | 2′-OMe | 2′-F | 2′-OMe | 2′-OMe | 2′-OMe | 2′-OMe | 2′-OMe | 2′-OMe |
| | PS + EVP | PS | | | | | | | | | | |
| | 13 | 14 | 15 | 16 | 17 | 18 | 19 | 20 | 21 | 22 | 23 | |
| | 2′-OMe | 2′-F | 2′-OMe | 2′-F | 2′-OMe | 2′-OMe | 2′-OMe | 2′-OMe | 2′-OMe + | 2′-OMe + | 2′-OMe | |
| | | | | | | | | | PS | PS | | |
| | 1 | 2 | 3 | 4 | 5 | 6 | 7 | 8 | 9 | 10 | 11 | 12 |
| C | 2′-OMe + | 2′-F + | 2′-OMe | 2′-F | 2′-F | 2′-F | 2′-OMe | 2′-OMe | 2′-OMe | 2′-OMe | 2′-OMe | 2′-OMe |
| | PS + EVP | PS | | | | | | | | | | |
| | 13 | 14 | 15 | 16 | 17 | 18 | 19 | 20 | 21 | 22 | 23 | |
| | 2′-OMe | 2′-F | 2′-OMe | 2′-F | 2′-OMe | 2′-OMe | 2′-OMe | 2′-OMe | 2′-OMe + | 2′-OMe + | 2′-OMe | |
| | | | | | | | | | PS | PS | | |
| | 1 | 2 | 3 | 4 | 5 | 6 | 7 | 8 | 9 | 10 | 11 | 12 |
| D | 2′-OMe + | 2′-F + | 2′-OMe | 2′-OMe | 2′-F | 2′-F | 2′-OMe | 2′-OMe | 2′-OMe | 2′-OMe | 2′-OMe | 2′-OMe |
| | PS + EVP | PS | | | | | | | | | | |
| | 13 | 14 | 15 | 16 | 17 | 18 | 19 | 20 | 21 | 22 | 23 | |
| | 2′-OMe | 2′-F | 2′-OMe | 2′-F | 2′-OMe | 2′-OMe | 2′-OMe | 2′-OMe | 2′-OMe + | 2′-OMe + | 2′-OMe | |
| | | | | | | | | | PS | PS | | |
| | 1 | 2 | 3 | 4 | 5 | 6 | 7 | 8 | 9 | 10 | 11 | 12 |
| E | 2′-OMe + | 2′-F + | 2′-F | 2′-OMe | 2′-F | 2′-F | 2′-OMe | 2′-OMe | 2′-OMe | 2′-OMe | 2′-OMe | 2′-OMe |
| | PS + EVP | PS | | | | | | | | | | |
| | 13 | 14 | 15 | 16 | 17 | 18 | 19 | 20 | 21 | 22 | 23 | |
| | 2′-OMe | 2′-F | 2′-OMe | 2′-F | 2′-OMe | 2′-OMe | 2′-OMe | 2′-OMe | 2′-OMe + | 2′-OMe + | 2′-OMe | |
| | | | | | | | | | PS | PS | | |
| | 1 | 2 | 3 | 4 | 5 | 6 | 7 | 8 | 9 | 10 | 11 | 12 |
| F | 2′-OMe + | 2′-F + | 2′-F | 2′-OMe | 2′-OMe | 2′-F | 2′-OMe | 2′-OMe | 2′-OMe | 2′-OMe | 2′-OMe | 2′-OMe |
| | PS + EVP | PS | | | | | | | | | | |
| | 13 | 14 | 15 | 16 | 17 | 18 | 19 | 20 | 21 | 22 | 23 | |
| | 2′-OMe | 2′-F | 2′-OMe | 2′-F | 2′-OMe | 2′-OMe | 2′-OMe | 2′-OMe | 2′-OMe + | 2′-OMe + | 2′-OMe | |
| | | | | | | | | | PS | PS | | |
| | 1 | 2 | 3 | 4 | 5 | 6 | 7 | 8 | 9 | 10 | 11 | 12 |
| G | 2′-OMe + PS | 2′-F + | 2′-OMe | 2′-OMe | 2′-OMe | 2′-F | 2′-OMe | 2′-OMe | 2′-OMe | 2′-OMe | 2′-OMe | 2′-OMe |
| | | PS | | | | | | | | | | |
| | 13 | 14 | 15 | 16 | 17 | 18 | 19 | 20 | 21 | 22 | 23 | |
| | 2′-OMe | 2′-F | 2′-OMe | 2′-F | 2′-OMe | 2′-OMe | 2′-OMe | 2′-OMe | 2′-OMe + | 2′-OMe + | 2′-OMe | |
| | | | | | | | | | PS | PS | | |

[0392] The sense strand was modified according to one of the modification patterns shown in Table 47:

TABLE 47
Modification of sense strand

| | Sense strand (SS) 5′-3′ | | | | | | | | | | |
|---|---|---|---|---|---|---|---|---|---|---|---|
| No. | 1 | 2 | 3 | 4 | 5 | 6 | 7 | 8 | 9 | 10 | 11 |
| a | 2′-OMe + PS | 2′-OMe + PS | 2′-OMe | 2′-OMe | 2′-OMe | 2′-OMe | 2′-F | 2′-OMe | 2′-F | 2′-F | 2′-F |
| | 12 | 13 | 14 | 15 | 16 | 17 | 18 | 19 | 20 | 21 | |
| | 2′-OMe | 2′-OMe | 2′-OMe | 2′-OMe | 2′-OMe | 2′-F | 2′-OMe | 2′-OMe | 2′-OMe | 2′-OMe | |
| | 1 | 2 | 3 | 4 | 5 | 6 | 7 | 8 | 9 | 10 | 11 |
| b | 2′-OMe + PS | 2′-OMe + PS | 2′-OMe | 2′-OMe | 2′-OMe | 2′-OMe | 2′-F | 2′-OMe | 2′-F | 2′-OMe | 2′-F |
| | 12 | 13 | 14 | 15 | 16 | 17 | 18 | 19 | 20 | 21 | |
| | 2′-OMe | 2′-OMe | 2′-OMe | 2′-OMe | 2′-OMe | 2′-F | 2′-OMe | 2′-OMe | 2′-OMe | 2′-OMe | |
| | 1 | 2 | 3 | 4 | 5 | 6 | 7 | 8 | 9 | 10 | 11 |
| c | 2′-OMe + PS | 2′-OMe + PS | 2′-OMe | 2′-OMe | 2′-OMe | 2′-OMe | 2′-F | 2′-OMe | 2′-F | 2′-F | 2′-F |
| | 12 | 13 | 14 | 15 | 16 | 17 | 18 | 19 | 20 | 21 | |
| | 2′-OMe | 2′-OMe | 2′-OMe | 2′-OMe | 2′-OMe | 2′-OMe | 2′-OMe | 2′-OMe | 2′-OMe | 2′-OMe | |

[0393] In the above tables, PS represents a phosphorothioate backbone.

[0394] The siRNA modification template, in which the antisense strand was modified according to modification pattern A and the sense strand was modified according to modification pattern a, was designated as DV25P.

[0395] The siRNA modification template, in which the antisense strand was modified according to modification pattern B and the sense strand was modified according to modification pattern a, was designated as DV26P.

[0396] The siRNA modification template, in which the antisense strand was modified according to modification pattern C and the sense strand was modified according to modification pattern a, was designated as DV27P.

[0397] The siRNA modification template, in which the antisense strand was modified according to modification pattern B and the sense strand was modified according to modification pattern b, was designated as DV28P.

[0398] The siRNA modification template, in which the antisense strand was modified according to modification pattern C and the sense strand was modified according to modification pattern b, was designated as DV29P.

[0399] The siRNA modification template, in which the antisense strand was modified according to modification pattern D and the sense strand was modified according to modification pattern b, was designated as DV32P.

[0400] The siRNA modification template, in which the antisense strand was modified according to modification pattern E and the sense strand was modified according to modification pattern b, was designated as DV33P.

[0401] The siRNA modification template, in which the antisense strand was modified according to modification pattern F and the sense strand was modified according to modification pattern b, was designated as DV34P.

[0402] The siRNA modification template, in which the antisense strand was modified according to modification pattern G and the sense strand was modified according to modification pattern c, was designated as DV22.

[0403] For compounds in which the sense and antisense strands are 20 and 22 nucleotides in length, respectively, the antisense strand was modified according to one of the modification patterns shown in Table 44:

TABLE 44
Modification of antisense strand

| | Antisense strand (AS) 5′-3′ | | | | | | | | | | |
|---|---|---|---|---|---|---|---|---|---|---|---|
| No. | 1 | 2 | 3 | 4 | 5 | 6 | 7 | 8 | 9 | 10 | 11 |
| A | 2′-OMe + | 2′-F + | 2′-OMe | 2′-OMe | 2′-OMe | 2′-F | 2′-OMe | 2′-OMe | 2′-OMe | 2′-OMe | 2′-OMe |
| | PS + EVP | PS | | | | | | | | | |
| | 12 | 13 | 14 | 15 | 16 | 17 | 18 | 19 | 20 | 21 | 22 |
| | 2′-OMe | 2′-OMe | 2′-F | 2′-OMe | 2′-F | 2′-OMe | 2′-OMe | 2′-OMe | 2′-OMe + | 2′-OMe + | 2′-OMe |
| | | | | | | | | | PS | PS | |
| | 1 | 2 | 3 | 4 | 5 | 6 | 7 | 8 | 9 | 10 | 11 |
| B | 2′-OMe + | 2′-F + | 2′-F | 2′-F | 2′-OMe | 2′-F | 2′-OMe | 2′-OMe | 2′-OMe | 2′-OMe | 2′-OMe |
| | PS + EVP | PS | | | | | | | | | |
| | 12 | 13 | 14 | 15 | 16 | 17 | 18 | 19 | 20 | 21 | 22 |
| | 2′-OMe | 2′-OMe | 2′-F | 2′-OMe | 2′-F | 2′-OMe | 2′-OMe | 2′-OMe | 2′-OMe + | 2′-OMe + | 2′-OMe |
| | | | | | | | | | PS | PS | |
| | 1 | 2 | 3 | 4 | 5 | 6 | 7 | 8 | 9 | 10 | 11 |
| C | 2′-OMe + | 2′-F + | 2′-OMe | 2′-F | 2′-F | 2′-F | 2′-OMe | 2′-OMe | 2′-OMe | 2′-OMe | 2′-OMe |
| | PS + EVP | PS | | | | | | | | | |
| | 12 | 13 | 14 | 15 | 16 | 17 | 18 | 19 | 20 | 21 | 22 |
| | 2′-OMe | 2′-OMe | 2′-F | 2′-OMe | 2′-F | 2′-OMe | 2′-OMe | 2′-OMe | 2′-OMe + | 2′-OMe + | 2′-OMe |
| | | | | | | | | | PS | PS | |
| | 1 | 2 | 3 | 4 | 5 | 6 | 7 | 8 | 9 | 10 | 11 |
| D | 2′-OMe + | 2′-F + | 2′-OMe | 2′-OMe | 2′-F | 2′-F | 2′-OMe | 2′-OMe | 2′-OMe | 2′-OMe | 2′-OMe |
| | PS + EVP | PS | | | | | | | | | |
| | 12 | 13 | 14 | 15 | 16 | 17 | 18 | 19 | 20 | 21 | 22 |
| | 2′-OMe | 2′-OMe | 2′-F | 2′-OMe | 2′-F | 2′-OMe | 2′-OMe | 2′-OMe | 2′-OMe + | 2′-OMe + | 2′-OMe |
| | | | | | | | | | PS | PS | |
| | 1 | 2 | 3 | 4 | 5 | 6 | 7 | 8 | 9 | 10 | 11 |
| E | 2′-OMe + | 2′-F + | 2′-F | 2′-OMe | 2′-F | 2′-F | 2′-OMe | 2′-OMe | 2′-OMe | 2′-OMe | 2′-OMe |
| | PS + EVP | PS | | | | | | | | | |
| | 12 | 13 | 14 | 15 | 16 | 17 | 18 | 19 | 20 | 21 | 22 |
| | 2′-OMe | 2′-OMe | 2′-F | 2′-OMe | 2′-F | 2′-OMe | 2′-OMe | 2′-OMe | 2′-OMe + | 2′-OMe + | 2′-OMe |
| | | | | | | | | | PS | PS | |
| | 1 | 2 | 3 | 4 | 5 | 6 | 7 | 8 | 9 | 10 | 11 |
| F | 2′-OMe + | 2′-F + | 2′-F | 2′-OMe | 2′-OMe | 2′-F | 2′-OMe | 2′-OMe | 2′-OMe | 2′-OMe | 2′-OMe |
| | PS + EVP | PS | | | | | | | | | |
| | 12 | 13 | 14 | 15 | 16 | 17 | 18 | 19 | 20 | 21 | 22 |
| | 2′-OMe | 2′-OMe | 2′-F | 2′-OMe | 2′-F | 2′-OMe | 2′-OMe | 2′-OMe | 2′-OMe + | 2′-OMe + | 2′-OMe |
| | | | | | | | | | PS | PS | |

[0404] The sense strand was modified according to one of the modification patterns shown in Table 48:

TABLE 48
Modification of sense strand

| | Sense strand (SS) 5′-3′ | | | | | | | | | |
|---|---|---|---|---|---|---|---|---|---|---|
| No. | 1 | 2 | 3 | 4 | 5 | 6 | 7 | 8 | 9 | 10 |
| a | 2′-OMe + PS | 2′-OMe + PS | 2′-OMe | 2′-OMe | 2′-OMe | 2′-F | 2′-OMe | 2′-F | 2′-F | 2′-F |
| | 11 | 12 | 13 | 14 | 15 | 16 | 17 | 18 | 19 | 20 |
| | 2′-OMe | 2′-OMe | 2′-OMe | 2′-OMe | 2′-OMe | 2′-F | 2′-OMe | 2′-OMe | 2′-OMe | 2′-OMe |
| | 1 | 2 | 3 | 4 | 5 | 6 | 7 | 8 | 9 | 10 |
| b | 2′-OMe + PS | 2′-OMe + PS | 2′-OMe | 2′-OMe | 2′-OMe | 2′-F | 2′-OMe | 2′-F | 2′-OMe | 2′-F |
| | 11 | 12 | 13 | 14 | 15 | 16 | 17 | 18 | 19 | 20 |
| | 2′-OMe | 2′-OMe | 2′-OMe | 2′-OMe | 2′-OMe | 2′-F | 2′-OMe | 2′-OMe | 2′-OMe | 2′-OMe |
| | 1 | 2 | 3 | 4 | 5 | 6 | 7 | 8 | 9 | 10 |
| c | 2′-OMe + PS | 2′-OMe + PS | 2′-OMe | 2′-OMe | 2′-OMe | 2′-F | 2′-OMe | 2′-F | 2′-F | 2′-F |
| | 11 | 12 | 13 | 14 | 15 | 16 | 17 | 18 | 19 | 20 |
| | 2′-OMe | 2′-OMe | 2′-OMe | 2′-OMe | 2′-OMe | 2′-OMe | 2′-OMe | 2′-OMe | 2′-OMe | 2′-OMe |

[0405] In the above tables, 2′-OMe represents 2′-O-methyl; 2′-F represents 2′-fluoro; PS represents a phosphorothioate backbone.

[0406] The siRNA modification template, in which the antisense strand was modified according to modification pattern A and the sense strand was modified according to modification pattern a, was designated as DV25P.

[0407] The siRNA modification template, in which the antisense strand was modified according to modification pattern B and the sense strand was modified according to modification pattern a, was designated as DV26P.

[0408] The siRNA modification template, in which the antisense strand was modified according to modification pattern C and the sense strand was modified according to modification pattern a, was designated as DV27P.

[0409] The siRNA modification template, in which the antisense strand was modified according to modification pattern B and the sense strand was modified according to modification pattern b, was designated as DV28P.

[0410] The siRNA modification template, in which the antisense strand was modified according to modification pattern C and the sense strand was modified according to modification pattern b, was designated as DV29P. The siRNA modification template, in which the antisense strand was modified according to modification pattern D and the sense strand was modified according to modification pattern b, was designated as DV32P. The siRNA modification template, in which the antisense strand was modified according to modification pattern E and the sense strand was modified according to modification pattern b, was designated as DV33P.

[0411] The siRNA modification template, in which the antisense strand was modified according to modification pattern F and the sense strand was modified according to modification pattern b, was designated as DV34P.

[0412] The template-modified sequences are detailed in Table 12, and the synthesis methods for these sequence were the same as in Example 1.

TABLE 12
Sequences modified with different modification templates

| | | | Modified | | Modified |
|---|---|---|---|---|---|
| | | | sequence SEQ | | sequence |
| | | | ID NO./ | | SEQ ID NO./ |
| | Template- | | corresponding | | corresponding |
| Unmodified | modified | | unmodified | | unmodified |
| sequence | sequence | Sense strand | sequence SEQ | Antisense strand | sequence |
| ID | ID | sequence 5′-3′ | ID NO. | sequence 5′-3′ | SEQ ID NO. |
| 1835 | C1835- | Ums-Ums-Gm-Gm-Gm- | 397/1 | UmsEVP-Afs-Cm-Uf-Uf-Uf- | 432/14 |
| | DV29P | Um-Uf-Um-Uf-Am-Af- | | Am-Am-Um-Um-Um-Um- | |
| | | Am-Am-Um-Um-Am- | | Am-Af-Am-Af-Cm-Cm-Cm- | |
| | | Af-Am-Gm-Um-Am | | Am-Ams-Ums-Um | |
| | C1835- | Ums-Ums-Gm-Gm-Gm- | 398/1 | UmsEVP-Afs-Cf-Uf-Um-Uf- | 433/14 |
| | DV26P | Um-Uf-Um-Uf-Af-Af- | | Am-Am-Um-Um-Um-Um- | |
| | | Am-Am-Um-Um-Am- | | Am-Af-Am-Af-Cm-Cm-Cm- | |
| | | Af-Am-Gm-Um-Am | | Am-Ams-Ums-Um | |
| | C1835- | Ums-Ums-Gm-Gm-Gm- | 398/1 | UmsEVP-Afs-Cm-Uf-Uf-Uf- | 432/14 |
| | DV27P | Um-Uf-Um-Uf-Af-Af- | | Am-Am-Um-Um-Um-Um- | |
| | | Am-Am-Um-Um-Am- | | Am-Af-Am-Af-Cm-Cm-Cm- | |
| | | Af-Am-Gm-Um-Am | | Am-Ams-Ums-Um | |
| | C1835- | Ums-Ums-Gm-Gm-Gm- | 397/1 | UmsEVP-Afs-Cf-Uf-Um-Uf- | 433/14 |
| | DV28P | \|Um-Uf-Um-Uf-Am-Af- | | Am-Am-Um-Um-Um-Um- | |
| | | Am-Am-Um-Um-Am- | | Am-Af-Am-Af-Cm-Cm-Cm- | |
| | | Af-Am-Gm-Um-Am | | Am-Ams-Ums-Um | |
| | C1835- | Ums-Ums-Gm-Gm-Gm- | 397/1 | UmsEVP-Afs-Cm-Um-Uf- | 434/14 |
| | DV32P | Um-Uf-Um-Uf-Am-Af- | | Uf-Am-Am-Um-Um-Um- | |
| | | Am-Am-Um-Um-Am- | | Um-Am-Af-Am-Af-Cm-Cm- | |
| | | Af-Am-Gm-Um-Am | | Cm-Am-Ams-Ums-Um | |
| | C1835- | Ums-Ums-Gm-Gm-Gm- | 397/1 | UmsEVP-Afs-Cf-Um-Um- | 435/14 |
| | DV34P | Um-Uf-Um-Uf-Am-Af- | | Uf-Am-Am-Um-Um-Um- | |
| | | Am-Am-Um-Um-Am- | | Um-Am-Af-Am-Af-Cm-Cm- | |
| | | Af-Am-Gm-Um-Am | | Cm-Am-Ams-Ums-Um | |
| | C1835- | Ums-Ums-Gm-Gm-Gm- | 398/1 | UmsEVP-Afs-Cm-Um-Um- | 436/14 |
| | DV25P | Um-Uf-Um-Uf-Af-Af- | | Uf-Am-Am-Um-Um-Um- | |
| | | Am-Am-Um-Um-Am- | | Um-Am-Af-Am-Af-Cm-Cm- | |
| | | Af-Am-Gm-Um-Am | | Cm-Am-Ams-Ums-Um | |
| | C1835- | Ums-Ums-Gm-Gm-Gm- | 397/1 | UmsEVP-Afs-Cf-Um-Uf-Uf- | 437/14 |
| | DV33P | Um-Uf-Um-Uf-Am-Af- | | Am-Am-Um-Um-Um-Um- | |
| | | Am-Am-Um-Um-Am- | | Am-Af-Am-Af-Cm-Cm-Cm- | |
| | | Af-Am-Gm-Um-Am | | Am-Ams-Ums-Um | |
| | C1835- | Ums-Ums-Gm-Gm-Gm- | 399/1 | Ums-Afs-Cm-Um-Um-Uf- | 438/14 |
| | DV22 | Um-Uf-Um-Uf-Af-Af- | | Am-Am-Um-Um-Um-Um- | |
| | | Am-Am-Um-Um-Am- | | Am-Af-Am-Af-Cm-Cm-Cm- | |
| | | Am-Am-Gm-Um-Am | | Am-Ams-Ums-Um | |
| 1816 | C1816- | Ums-Ums-Cm-Am-Am- | 400/2 | AmsEVP-Afs-Um-Uf-Uf-Uf- | 439/15 |
| | DV29P | Gm-Uf-Um-Gf-Am-Gf- | | Um-Gm-Um-Um-Cm-Um- | |
| | | Am-Am-Cm-Am-Am- | | Cm-Af-Am-Cf-Um-Um-Gm- | |
| | | Af-Am-Am-Um-Um | | Am-Ams-Ams-Am | |
| | C1816- | Ums-Ums-Cm-Am-Am- | 401/2 | AmsEVP-Afs-Uf-Uf-Um-Uf- | 440/15 |
| | DV26P | Gm-Uf-Um-Gf-Af-Gf- | | Um-Gm-Um-Um-Cm-Um- | |
| | | Am-Am-Cm-Am-Am- | | Cm-Af-Am-Cf-Um-Um-Gm- | |
| | | Af-Am-Am-Um-Um | | Am-Ams-Ams-Am | |
| | C1816- | Ums-Ums-Cm-Am-Am- | 401/2 | AmsEVP-Afs-Um-Uf-Uf-Uf- | 439/15 |
| | DV27P | Gm-Uf-Um-Gf-Af-Gf- | | Um-Gm-Um-Um-Cm-Um- | |
| | | Am-Am-Cm-Am-Am- | | Cm-Af-Am-Cf-Um-Um-Gm- | |
| | | Af-Am-Am-Um-Um | | Am-Ams-Ams-Am | |
| | C1816- | Ums-Ums-Cm-Am-Am- | 400/2 | AmsEVP-Afs-Uf-Uf-Um-Uf- | 440/15 |
| | DV28P | Gm-Uf-Um-Gf-Am-Gf- | | Um-Gm-Um-Um-Cm-Um- | |
| | | Am-Am-Cm-Am-Am- | | Cm-Af-Am-Cf-Um-Um-Gm- | |
| | | Af-Am-Am-Um-Um | | Am-Ams-Ams-Am | |
| | C1816- | Ums-Ums-Cm-Am-Am- | 400/2 | AmsEVP-Afs-Um-Um-Uf- | 441/15 |
| | DV32P | Gm-Uf-Um-Gf-Am-Gf- | | Uf-Um-Gm-Um-Um-Cm- | |
| | | Am-Am-Cm-Am-Am- | | Um-Cm-Af-Am-Cf-Um-Um- | |
| | | Af-Am-Am-Um-Um | | Gm-Am-Ams-Ams-Am | |
| | C1816- | Ums-Ums-Cm-Am-Am- | 400/2 | AmsEVP-Afs-Uf-Um-Um- | 442/15 |
| | DV34P | Gm-Uf-Um-Gf-Am-Gf- | | Uf-Um-Gm-Um-Um-Cm- | |
| | | Am-Am-Cm-Am-Am- | | Um-Cm-Af-Am-Cf-Um-Um- | |
| | | Af-Am-Am-Um-Um | | Gm-Am-Ams-Ams-Am | |
| | C1816- | Ums-Ums-Cm-Am-Am- | 401/2 | AmsEVP-Afs-Um-Um-Um- | 443/15 |
| | DV25P | Gm-Uf-Um-Gf-Af-Gf- | | Uf-Um-Gm-Um-Um-Cm- | |
| | | Am-Am-Cm-Am-Am- | | Um-Cm-Af-Am-Cf-Um-Um- | |
| | | Af-Am-Am-Um-Um | | Gm-Am-Ams-Ams-Am | |
| | C1816- | Ums-Ums-Cm-Am-Am- | 400/2 | AmsEVP-Afs-Uf-Um-Uf-Uf- | 444/15 |
| | DV33P | Gm-Uf-Um-Gf-Am-Gf- | | Um-Gm-Um-Um-Cm-Um- | |
| | | Am-Am-Cm-Am-Am- | | Cm-Af-Am-Cf-Um-Um-Gm- | |
| | | Af-Am-Am-Um-Um | | Am-Ams-Ams-Am | |
| | C1816- | Ums-Ums-Cm-Am-Am- | 402/2 | Ams-Afs-Um-Um-Um-Uf- | 445/15 |
| | DV22 | Gm-Uf-Um-Gf-Af-Gf- | | Um-Gm-Um-Um-Cm-Um- | |
| | | Am-Am-Cm-Am-Am- | | Cm-Af-Am-Cf-Um-Um-Gm- | |
| | | Am-Am-Am-Um-Um | | Am-Ams-Ams-Am | |
| 1812 | C1812- | Cms-Cms-Um-Um-Um- | 403/3 | UmsEVP-Ufs-Um-Gf-Uf-Uf- | 446/16 |
| | DV29P | Um-Cf-Am-Af-Gm-Uf- | | Cm-Um-Cm-Am-Am-Cm- | |
| | | Um-Gm-Am-Gm-Am- | | Um-Uf-Gm-Af-Am-Am-Am- | |
| | | Af-Cm-Am-Am-Am | | Gm-Gms-Gms-Am | |
| | C1812- | Cms-Cms-Um-Um-Um- | 404/3 | UmsEVP-Ufs-Uf-Gf-Um-Uf- | 447/16 |
| | DV26P | Um-Cf-Am-Af-Gf-Uf- | | Cm-Um-Cm-Am-Am-Cm- | |
| | | Um-Gm-Am-Gm-Am- | | Um-Uf-Gm-Af-Am-Am-Am- | |
| | | Af-Cm-Am-Am-Am | | Gm-Gms-Gms-Am | |
| | C1812- | Cms-Cms-Um-Um-Um- | 404/3 | UmsEVP-Ufs-Um-Gf-Uf-Uf- | 446/16 |
| | DV27P | Um-Cf-Am-Af-Gf-Uf- | | Cm-Um-Cm-Am-Am-Cm- | |
| | | Um-Gm-Am-Gm-Am- | | Um-Uf-Gm-Af-Am-Am-Am- | |
| | | Af-Cm-Am-Am-Am | | Gm-Gms-Gms-Am | |
| | C1812- | Cms-Cms-Um-Um-Um- | 403/3 | UmsEVP-Ufs-Uf-Gf-Um-Uf- | 447/16 |
| | DV28P | Um-Cf-Am-Af-Gm-Uf- | | Cm-Um-Cm-Am-Am-Cm- | |
| | | Um-Gm-Am-Gm-Am- | | Um-Uf-Gm-Af-Am-Am-Am- | |
| | | Af-Cm-Am-Am-Am | | Gm-Gms-Gms-Am | |
| | C1812- | Cms-Cms-Um-Um-Um- | 403/3 | UmsEVP-Ufs-Um-Gm-Uf- | 448/16 |
| | DV32P | Um-Cf-Am-Af-Gm-Uf- | | Uf-Cm-Um-Cm-Am-Am- | |
| | | Um-Gm-Am-Gm-Am- | | Cm-Um-Uf-Gm-Af-Am-Am- | |
| | | Af-Cm-Am-Am-Am | | Am-Gm-Gms-Gms-Am | |
| | C1812- | Cms-Cms-Um-Um-Um- | 403/3 | UmsEVP-Ufs-Uf-Gm-Um- | 449/16 |
| | DV34P | Um-Cf-Am-Af-Gm-Uf- | | Uf-Cm-Um-Cm-Am-Am- | |
| | | Um-Gm-Am-Gm-Am- | | Cm-Um-Uf-Gm-Af-Am-Am- | |
| | | Af-Cm-Am-Am-Am | | Am-Gm-Gms-Gms-Am | |
| | C1812- | Cms-Cms-Um-Um-Um- | 404/3 | UmsEVP-Ufs-Um-Gm-Um- | 450/16 |
| | DV25P | Um-Cf-Am-Af-Gf-Uf- | | Uf-Cm-Um-Cm-Am-Am- | |
| | | Um-Gm-Am-Gm-Am- | | Cm-Um-Uf-Gm-Af-Am-Am- | |
| | | Af-Cm-Am-Am-Am | | Am-Gm-Gms-Gms-Am | |
| | C1812- | Cms-Cms-Um-Um-Um- | 403/3 | UmsEVP-Ufs-Uf-Gm-Uf-Uf- | 451/16 |
| | DV33P | Um-Cf-Am-Af-Gm-Uf- | | Cm-Um-Cm-Am-Am-Cm- | |
| | | Um-Gm-Am-Gm-Am- | | Um-Uf-Gm-Af-Am-Am-Am- | |
| | | Af-Cm-Am-Am-Am | | Gm-Gms-Gms-Am | |
| | C1812- | Cms-Cms-Um-Um-Um- | 405/3 | Ums-Ufs-Um-Gm-Um-Uf- | 452/16 |
| | DV22 | Um-Cf-Am-Af-Gf-Uf- | | Cm-Um-Cm-Am-Am-Cm- | |
| | | Um-Gm-Am-Gm-Am- | | Um-Uf-Gm-Af-Am-Am-Am- | |
| | | Am-Cm-Am-Am-Am | | Gm-Gms-Gms-Am | |
| 1579 | C1579- | Cms-Cms-Um-Um-Um- | 406/4 | UmsEVP-Cfs-Gm-Af-Cf-Uf- | 453/17 |
| | DV29P | Um-Cf-Um-Uf-Cm-Uf- | | Cm-Am-Um-Um-Am-Gm- | |
| | | Am-Am-Um-Gm-Am- | | Am-Af-Gm-Af-Am-Am-Am- | |
| | | Gf-Um-Cm-Gm-Am | | Gm-Gms-Ums-Gm | |
| | C1579- | Cms-Cms-Um-Um-Um- | 407/4 | UmsEVP-Cfs-Gf-Af-Cm-Uf- | 454/17 |
| | DV26P | Um-Cf-Um-Uf-Cf-Uf- | | Cm-Am-Um-Um-Am-Gm- | |
| | | Am-Am-Um-Gm-Am- | | Am-Af-Gm-Af-Am-Am-Am- | |
| | | Gf-Um-Cm-Gm-Am | | Gm-Gms-Ums-Gm | |
| | C1579- | Cms-Cms-Um-Um-Um- | 407/4 | UmsEVP-Cfs-Gm-Af-Cf-Uf- | 453/17 |
| | DV27P | Um-Cf-Um-Uf-Cf-Uf- | | Cm-Am-Um-Um-Am-Gm- | |
| | | Am-Am-Um-Gm-Am- | | Am-Af-Gm-Af-Am-Am-Am- | |
| | | Gf-Um-Cm-Gm-Am | | Gm-Gms-Ums-Gm | |
| | C1579- | Cms-Cms-Um-Um-Um- | 406/4 | UmsEVP-Cfs-Gf-Af-Cm-Uf- | 454/17 |
| | DV28P | Um-Cf-Um-Uf-Cm-Uf- | | Cm-Am-Um-Um-Am-Gm- | |
| | | Am-Am-Um-Gm-Am- | | Am-Af-Gm-Af-Am-Am-Am- | |
| | | Gf-Um-Cm-Gm-Am | | Gm-Gms-Ums-Gm | |
| | C1579- | Cms-Cms-Um-Um-Um- | 406/4 | UmsEVP-Cfs-Gm-Am-Cf- | 455/17 |
| | DV32P | Um-Cf-Um-Uf-Cm-Uf- | | Uf-Cm-Am-Um-Um-Am- | |
| | | Am-Am-Um-Gm-Am- | | Gm-Am-Af-Gm-Af-Am-Am- | |
| | | Gf-Um-Cm-Gm-Am | | Am-Gm-Gms-Ums-Gm | |
| | C1579- | Cms-Cms-Um-Um-Um- | 406/4 | UmsEVP-Cfs-Gf-Am-Cm- | 456/17 |
| | DV34P | Um-Cf-Um-Uf-Cm-Uf- | | Uf-Cm-Am-Um-Um-Am- | |
| | | Am-Am-Um-Gm-Am- | | Gm-Am-Af-Gm-Af-Am-Am- | |
| | | Gf-Um-Cm-Gm-Am | | Am-Gm-Gms-Ums-Gm | |
| | C1579- | Cms-Cms-Um-Um-Um- | 407/4 | UmsEVP-Cfs-Gm-Am-Cm- | 457/17 |
| | DV25P | Um-Cf-Um-Uf-Cf-Uf- | | Uf-Cm-Am-Um-Um-Am- | |
| | | Am-Am-Um-Gm-Am- | | Gm-Am-Af-Gm-Af-Am-Am- | |
| | | Gf-Um-Cm-Gm-Am | | Am-Gm-Gms-Ums-Gm | |
| | C1579- | Cms-Cms-Um-Um-Um- | 406/4 | UmsEVP-Cfs-Gf-Am-Cf-Uf- | 458/17 |
| | DV33P | Um-Cf-Um-Uf-Cm-Uf- | | Cm-Am-Um-Um-Am-Gm- | |
| | | Am-Am-Um-Gm-Am- | | Am-Af-Gm-Af-Am-Am-Am- | |
| | | Gf-Um-Cm-Gm-Am | | Gm-Gms-Ums-Gm | |
| | C1579- | Cms-Cms-Um-Um-Um- | 408/4 | Ums-Cfs-Gm-Am-Cm-Uf- | 459/17 |
| | DV22 | Um-Cf-Um-Uf-Cf-Uf- | | Cm-Am-Um-Um-Am-Gm- | |
| | | Am-Am-Um-Gm-Am- | | Am-Af-Gm-Af-Am-Am-Am- | |
| | | Gm-Um-Cm-Gm-Am | | Gm-Gms-Ums-Gm | |
| 1836 | C1836- | Ums-Gms-Gm-Gm-Um- | 409/5 | AmsEVP-Ufs-Am-Cf-Uf-Uf- | 460/18 |
| | DV29P | Um-Uf-Um-Af-Am-Af- | | Um-Am-Am-Um-Um-Um- | |
| | | Am-Um-Um-Am-Am- | | Um-Af-Am-Af-Am-Cm-Cm- | |
| | | Af-Gm-Um-Am-Um | | Cm-Ams-Ams-Um | |
| | C1836- | Ums-Gms-Gm-Gm-Um- | 410/5 | AmsEVP-Ufs-Af-Cf-Um-Uf- | 461/18 |
| | DV26P | Um-Uf-Um-Af-Af-Af- | | Um-Am-Am-Um-Um-Um- | |
| | | Am-Um-Um-Am-Am- | | Um-Af-Am-Af-Am-Cm-Cm- | |
| | | Af-Gm-Um-Am-Um | | Cm-Ams-Ams-Um | |
| | C1836- | Ums-Gms-Gm-Gm-Um- | 410/5 | AmsEVP-Ufs-Am-Cf-Uf-Uf- | 460/18 |
| | DV27P | Um-Uf-Um-Af-Af-Af- | | Um-Am-Am-Um-Um-Um- | |
| | | Am-Um-Um-Am-Am- | | Um-Af-Am-Af-Am-Cm-Cm- | |
| | | Af-Gm-Um-Am-Um | | Cm-Ams-Ams-Um | |
| | C1836- | Ums-Gms-Gm-Gm-Um- | 409/5 | AmsEVP-Ufs-Af-Cf-Um-Uf- | 461/18 |
| | DV28P | Um-Uf-Um-Af-Am-Af- | | Um-Am-Am-Um-Um-Um- | |
| | | Am-Um-Um-Am-Am- | | Um-Af-Am-Af-Am-Cm-Cm- | |
| | | Af-Gm-Um-Am-Um | | Cm-Ams-Ams-Um | |
| | C1836- | Ums-Gms-Gm-Gm-Um- | 409/5 | AmsEVP-Ufs-Am-Cm-Uf- | 462/18 |
| | DV32P | Um-Uf-Um-Af-Am-Af- | | Uf-Um-Am-Am-Um-Um- | |
| | | Am-Um-Um-Am-Am- | | Um-Um-Af-Am-Af-Am-Cm- | |
| | | Af-Gm-Um-Am-Um | | Cm-Cm-Ams-Ams-Um | |
| | C1836- | Ums-Gms-Gm-Gm-Um- | 409/5 | AmsEVP-Ufs-Af-Cm-Um- | 463/18 |
| | DV34P | Um-Uf-Um-Af-Am-Af- | | Uf-Um-Am-Am-Um-Um- | |
| | | Am-Um-Um-Am-Am- | | Um-Um-Af-Am-Af-Am-Cm- | |
| | | Af-Gm-Um-Am-Um | | Cm-Cm-Ams-Ams-Um | |
| | C1789- | Gms-Ums-Um-Um-Gm- | 411/5 | AmsEVP-Cfs-Am-Cf-Uf-Uf- | 464/18 |
| | DV29P | Um-Gf-Am-Af-Am-Cf- | | Um-Um-Um-Um-Gm-Um- | |
| | | Am-Am-Am-Am-Am- | | Um-Uf-Cm-Af-Cm-Am-Am- | |
| | | Af-Gm-Um-Gm-Um | | Am-Cms-Ams-Am | |
| | C1789- | Gms-Ums-Um-Um-Gm- | 412/5 | AmsEVP-Cfs-Af-Cf-Um-Uf- | 465/18 |
| | DV26P | Um-Gf-Am-Af-Af-Cf- | | Um-Um-Um-Um-Gm-Um- | |
| | | Am-Am-Am-Am-Am- | | Um-Uf-Cm-Af-Cm-Am-Am- | |
| | | Af-Gm-Um-Gm-Um | | Am-Cms-Ams-Am | |
| | C1789- | Gms-Ums-Um-Um-Gm- | 412/5 | AmsEVP-Cfs-Am-Cf-Uf-Uf- | 464/18 |
| | DV27P | Um-Gf-Am-Af-Af-Cf- | | Um-Um-Um-Um-Gm-Um- | |
| | | Am-Am-Am-Am-Am- | | Um-Uf-Cm-Af-Cm-Am-Am- | |
| | | Af-Gm-Um-Gm-Um | | Am-Cms-Ams-Am | |
| 1789 | C1789- | Gms-Ums-Um-Um-Gm- | 411/6 | AmsEVP-Cfs-Af-Cf-Um-Uf- | 465/19 |
| | DV28P | Um-Gf-Am-Af-Am-Cf- | | Um-Um-Um-Um-Gm-Um- | |
| | | Am-Am-Am-Am-Am- | | Um-Uf-Cm-Af-Cm-Am-Am- | |
| | | Af-Gm-Um-Gm-Um | | Am-Cms-Ams-Am | |
| | C1789- | Gms-Ums-Um-Um-Gm- | 411/6 | AmsEVP-Cfs-Am-Cm-Uf- | 466/19 |
| | DV32P | Um-Gf-Am-Af-Am-Cf- | | Uf-Um-Um-Um-Um-Gm- | |
| | | Am-Am-Am-Am-Am- | | Um-Um-Uf-Cm-Af-Cm-Am- | |
| | | Af-Gm-Um-Gm-Um | | Am-Am-Cms-Ams-Am | |
| | C1789- | Gms-Ums-Um-Um-Gm- | 411/6 | AmsEVP-Cfs-Af-Cm-Um- | 467/19 |
| | DV34P | Um-Gf-Am-Af-Am-Cf- | | Uf-Um-Um-Um-Um-Gm- | |
| | | Am-Am-Am-Am-Am- | | Um-Um-Uf-Cm-Af-Cm-Am- | |
| | | Af-Gm-Um-Gm-Um | | Am-Am-Cms-Ams-Am | |
| | C1789- | Gms-Ums-Um-Um-Gm- | 412/6 | AmsEVP-Cfs-Am-Cm-Um- | 468/19 |
| | DV25P | Um-Gf-Am-Af-Af-Cf- | | Uf-Um-Um-Um-Um-Gm- | |
| | | Am-Am-Am-Am-Am- | | Um-Um-Uf-Cm-Af-Cm-Am- | |
| | | Af-Gm-Um-Gm-Um | | Am-Am-Cms-Ams-Am | |
| | C1789- | Gms-Ums-Um-Um-Gm- | 411/6 | AmsEVP-Cfs-Af-Cm-Uf-Uf- | 469/19 |
| | DV33P | Um-Gf-Am-Af-Am-Cf- | | Um-Um-Um-Um-Gm-Um- | |
| | | Am-Am-Am-Am-Am- | | Um-Uf-Cm-Af-Cm-Am-Am- | |
| | | Af-Gm-Um-Gm-Um | | Am-Cms-Ams-Am | |
| | C1789- | Gms-Ums-Um-Um-Gm- | 413/6 | Ams-Cfs-Am-Cm-Um-Uf- | 470/19 |
| | DV22 | Um-Gf-Am-Af-Af-Cf- | | Um-Um-Um-Um-Gm-Um- | |
| | | Am-Am-Am-Am-Am- | | Um-Uf-Cm-Af-Cm-Am-Am- | |
| | | Am-Gm-Um-Gm-Um | | Am-Cms-Ams-Am | |
| 1839 | C1839- | Gms-Ums-Um-Um-Um- | 414/7 | UmsEVP-Gfs-Um-Af-Uf-Af- | 471/20 |
| | DV29P | Am-Af-Am-Af-Um-Uf- | | Cm-Um-Um-Um-Am-Am- | |
| | | Am-Am-Am-Gm-Um- | | Um-Uf-Um-Uf-Am-Am-Am- | |
| | | Af-Um-Am-Cm-Am | | Am-Cms-Cms-Cm | |
| | C1839- | Gms-Ums-Um-Um-Um- | 415/7 | UmsEVP-Gfs-Uf-Af-Um-Af- | 472/20 |
| | DV26P | Am-Af-Am-Af-Uf-Uf- | | Cm-Um-Um-Um-Am-Am- | |
| | | Am-Am-Am-Gm-Um- | | Um-Uf-Um-Uf-Am-Am-Am- | |
| | | Af-Um-Am-Cm-Am | | Am-Cms-Cms-Cm | |
| | C1839- | Gms-Ums-Um-Um-Um- | 415/7 | UmsEVP-Gfs-Um-Af-Uf-Af- | 471/20 |
| | DV27P | Am-Af-Am-Af-Uf-Uf- | | Cm-Um-Um-Um-Am-Am- | |
| | | Am-Am-Am-Gm-Um- | | Um-Uf-Um-Uf-Am-Am-Am- | |
| | | Af-Um-Am-Cm-Am | | Am-Cms-Cms-Cm | |
| | C1839- | Gms-Ums-Um-Um-Um- | 414/7 | UmsEVP-Gfs-Uf-Af-Um-Af- | 472/20 |
| | DV28P | Am-Af-Am-Af-Um-Uf- | | Cm-Um-Um-Um-Am-Am- | |
| | | Am-Am-Am-Gm-Um- | | Um-Uf-Um-Uf-Am-Am-Am- | |
| | | Af-Um-Am-Cm-Am | | Am-Cms-Cms-Cm | |
| | C1839- | Gms-Ums-Um-Um-Um- | 414/7 | UmsEVP-Gfs-Um-Am-Uf- | 473/20 |
| | DV32P | Am-Af-Am-Af-Um-Uf- | | Af-Cm-Um-Um-Um-Am- | |
| | | Am-Am-Am-Gm-Um- | | Am-Um-Uf-Um-Uf-Am-Am- | |
| | | Af-Um-Am-Cm-Am | | Am-Am-Cms-Cms-Cm | |
| | C1839- | Gms-Ums-Um-Um-Um- | 414/7 | UmsEVP-Gfs-Uf-Am-Um- | 474/20 |
| | DV34P | Am-Af-Am-Af-Um-Uf- | | Af-Cm-Um-Um-Um-Am- | |
| | | Am-Am-Am-Gm-Um- | | Am-Um-Uf-Um-Uf-Am-Am- | |
| | | Af-Um-Am-Cm-Am | | Am-Am-Cms-Cms-Cm | |
| 1791 | C1791- | Ums-Ums-Gm-Um-Gm- | 416/8 | UmsEVP-Afs-Am-Cf-Af-Cf- | 475/21 |
| | DV29P | \|Am-Af-Am-Cf-Am-Af- | | Um-Um-Um-Um-Um-Um- | |
| | | Am-Am-Am-Am-Gm- | | Gm-Uf-Um-Uf-Cm-Am-Cm- | |
| | | Uf-Gm-Um-Um-Am | | Am-Ams-Ams-Cm | |
| | C1791- | Ums-Ums-Gm-Um-Gm- | 417/8 | UmsEVP-Afs-Af-Cf-Am-Cf- | 476/21 |
| | DV26P | Am-Af-Am-Cf-Af-Af- | | Um-Um-Um-Um-Um-Um- | |
| | | Am-Am-Am-Am-Gm- | | Gm-Uf-Um-Uf-Cm-Am-Cm- | |
| | | Uf-Gm-Um-Um-Am | | Am-Ams-Ams-Cm | |
| | C1791- | Ums-Ums-Gm-Um-Gm- | 417/8 | UmsEVP-Afs-Am-Cf-Af-Cf- | 475/21 |
| | DV27P | Am-Af-Am-Cf-Af-Af- | | Um-Um-Um-Um-Um-Um- | |
| | | Am-Am-Am-Am-Gm- | | Gm-Uf-Um-Uf-Cm-Am-Cm- | |
| | | Uf-Gm-Um-Um-Am | | Am-Ams-Ams-Cm | |
| | C1791- | Ums-Ums-Gm-Um-Gm- | 416/8 | UmsEVP-Afs-Af-Cf-Am-Cf- | 476/21 |
| | DV28P | \| Am-Af-Am-Cf-Am-Af- | | Um-Um-Um-Um-Um-Um- | |
| | | Am-Am-Am-Am-Gm- | | Gm-Uf-Um-Uf-Cm-Am-Cm- | |
| | | Uf-Gm-Um-Um-Am | | Am-Ams-Ams-Cm | |
| | C1791- | Ums-Ums-Gm-Um-Gm- | 416/8 | UmsEVP-Afs-Am-Cm-Af- | 477/21 |
| | DV32P | \| Am-Af-Am-Cf-Am-Af- | | Cf-Um-Um-Um-Um-Um- | |
| | | Am-Am-Am-Am-Gm- | | Um-Gm-Uf-Um-Uf-Cm-Am- | |
| | | Uf-Gm-Um-Um-Am | | Cm-Am-Ams-Ams-Cm | |
| | C1791- | Ums-Ums-Gm-Um-Gm- | 416/8 | UmsEVP-Afs-Af-Cm-Am- | 478/21 |
| | DV34P | \|Am-Af-Am-Cf-Am-Af- | | Cf-Um-Um-Um-Um-Um- | |
| | | Am-Am-Am-Am-Gm- | | Um-Gm-Uf-Um-Uf-Cm-Am- | |
| | | Uf-Gm-Um-Um-Am | | Cm-Am-Ams-Ams-Cm | |
| 1795 | C1795- | Gms-Ams-Am-Am-Cm- | 418/9 | AmsEVP-Afs-Gm-Gf-Gf-Af- | 479/22 |
| | DV29P | Am-Af-Am-Af-Am-Af- | | Am-Cm-Am-Cm-Um-Um- | |
| | | Gm-Um-Gm-Um-Um- | | Um-Uf-Um-Uf-Gm-Um-Um- | |
| | | Cf-Cm-Cm-Um-Um | | Um-Cms-Ams-Cm | |
| | C1795- | Gms-Ams-Am-Am-Cm- | 419/9 | AmsEVP-Afs-Gf-Gf-Gm-Af- | 480/22 |
| | DV26P | Am-Af-Am-Af-Af-Af- | | Am-Cm-Am-Cm-Um-Um- | |
| | | Gm-Um-Gm-Um-Um- | | Um-Uf-Um-Uf-Gm-Um-Um- | |
| | | Cf-Cm-Cm-Um-Um | | Um-Cms-Ams-Cm | |
| | C1795- | Gms-Ams-Am-Am-Cm- | 419/9 | AmsEVP-Afs-Gm-Gf-Gf-Af- | 479/22 |
| | DV27P | Am-Af-Am-Af-Af-Af- | | Am-Cm-Am-Cm-Um-Um- | |
| | | Gm-Um-Gm-Um-Um- | | Um-Uf-Um-Uf-Gm-Um-Um- | |
| | | Cf-Cm-Cm-Um-Um | | Um-Cms-Ams-Cm | |
| | C1795- | Gms-Ams-Am-Am-Cm- | 418/9 | AmsEVP-Afs-Gf-Gf-Gm-Af- | 480/22 |
| | DV28P | Am-Af-Am-Af-Am-Af- | | Am-Cm-Am-Cm-Um-Um- | |
| | | Gm-Um-Gm-Um-Um- | | Um-Uf-Um-Uf-Gm-Um-Um- | |
| | | Cf-Cm-Cm-Um-Um | | Um-Cms-Ams-Cm | |
| | C1795- | Gms-Ams-Am-Am-Cm- | 418/9 | AmsEVP-Afs-Gm-Gm-Gf- | 481/22 |
| | DV32P | Am-Af-Am-Af-Am-Af- | | Af-Am-Cm-Am-Cm-Um- | |
| | | Gm-Um-Gm-Um-Um- | | Um-Um-Uf-Um-Uf-Gm-Um- | |
| | | Cf-Cm-Cm-Um-Um | | Um-Um-Cms-Ams-Cm | |
| | C1795- | Gms-Ams-Am-Am-Cm- | 418/9 | AmsEVP-Afs-Gf-Gm-Gm- | 482/22 |
| | DV34P | Am-Af-Am-Af-Am-Af- | | Af-Am-Cm-Am-Cm-Um- | |
| | | Gm-Um-Gm-Um-Um- | | Um-Um-Uf-Um-Uf-Gm-Um- | |
| | | Cf-Cm-Cm-Um-Um | | Um-Um-Cms-Ams-Cm | |
| 1585s | C1585s- | Cms-Ums-Um-Cm-Um- | 420/10 | UmsEVP-Afs-Am-Af-Gf-Uf- | 483/23 |
| | DV29P | Af-Am-Uf-Gm-Af-Gm- | | Cm-Gm-Am-Cm-Um-Cm- | |
| | | Um-Cm-Gm-Am-Cf- | | Am-Uf-Um-Af-Gm-Am-Am- | |
| | | Um-Um-Um-Am | | Gms-Ams-Am | |
| | C1585s- | Cms-Ums-Um-Cm-Um- | 421/10 | UmsEVP-Afs-Af-Af-Gm-Uf- | 484/23 |
| | DV26P | Af-Am-Uf-Gf-Af-Gm- | | Cm-Gm-Am-Cm-Um-Cm- | |
| | | Um-Cm-Gm-Am-Cf- | | Am-Uf-Um-Af-Gm-Am-Am- | |
| | | Um-Um-Um-Am | | Gms-Ams-Am | |
| | C1585s- | Cms-Ums-Um-Cm-Um- | 421/10 | UmsEVP-Afs-Am-Af-Gf-Uf- | 483/23 |
| | DV27P | Af-Am-Uf-Gf-Af-Gm- | | Cm-Gm-Am-Cm-Um-Cm- | |
| | | Um-Cm-Gm-Am-Cf- | | Am-Uf-Um-Af-Gm-Am-Am- | |
| | | Um-Um-Um-Am | | Gms-Ams-Am | |
| | C1585s- | Cms-Ums-Um-Cm-Um- | 420/10 | UmsEVP-Afs-Af-Af-Gm-Uf- | 484/23 |
| | DV28P | Af-Am-Uf-Gm-Af-Gm- | | Cm-Gm-Am-Cm-Um-Cm- | |
| | | Um-Cm-Gm-Am-Cf- | | Am-Uf-Um-Af-Gm-Am-Am- | |
| | | Um-Um-Um-Am | | Gms-Ams-Am | |
| | C1585s- | Cms-Ums-Um-Cm-Um- | 420/10 | UmsEVP-Afs-Am-Am-Gf- | 485/23 |
| | DV32P | Af-Am-Uf-Gm-Af-Gm- | | Uf-Cm-Gm-Am-Cm-Um- | |
| | | Um-Cm-Gm-Am-Cf- | | Cm-Am-Uf-Um-Af-Gm-Am- | |
| | | Um-Um-Um-Am | | Am-Gms-Ams-Am | |
| | C1585s- | Cms-Ums-Um-Cm-Um- | 420/10 | UmsEVP-Afs-Af-Am-Gm- | 486/23 |
| | DV34P | Af-Am-Uf-Gm-Af-Gm- | | Uf-Cm-Gm-Am-Cm-Um- | |
| | | Um-Cm-Gm-Am-Cf- | | Cm-Am-Uf-Um-Af-Gm-Am- | |
| | | Um-Um-Um-Am | | Am-Gms-Ams-Am | |
| | C1585s- | Cms-Ums-Um-Cm-Um- | 422/10 | Ums-Afs-Am-Am-Gm-Uf- | 487/23 |
| | DV22 | Af-Am-Uf-Gf-Af-Gm- | | Cm-Gm-Am-Cm-Um-Cm- | |
| | | Um-Cm-Gm-Am-Cm- | | Am-Uf-Um-Af-Gm-Am-Am- | |
| | | Um-Um-Um-Am | | Gms-Ams-Am | |
| 1576s | C1576s- | Cms-Cms-Am-Cm-Cm- | 423/11 | UmsEVP-Ufs-Cm-Af-Uf-Uf- | 488/24 |
| | DV29P | \|Uf-Um-Uf-Um-Cf-Um- | | Am-Gm-Am-Am-Gm-Am- | |
| | | Um-Cm-Um-Am-Af- | | Am-Af-Am-Gf-Gm-Um-Gm- | |
| | | Um-Gm-Am-Am | | Gms-Gms-Am | |
| | C1576s- | Cms-Cms-Am-Cm-Cm- | 423/11 | UmsEVP-Ufs-Cf-Af-Um-Uf- | 489/24 |
| | DV28P | Uf-Um-Uf-Um-Cf-Um- | | Am-Gm-Am-Am-Gm-Am- | |
| | | Um-Cm-Um-Am-Af- | | Am-Af-Am-Gf-Gm-Um-Gm- | |
| | | Um-Gm-Am-Am | | Gms-Gms-Am | |
| | C1576s- | Cms-Cms-Am-Cm-Cm- | 424/11 | UmsEVP-Ufs-Cf-Af-Um-Uf- | 489/24 |
| | DV26P | Uf-Um-Uf-Uf-Cf-Um- | | Am-Gm-Am-Am-Gm-Am- | |
| | | Um-Cm-Um-Am-Af- | | Am-Af-Am-Gf-Gm-Um-Gm- | |
| | | Um-Gm-Am-Am | | Gms-Gms-Am | |
| | C1576s- | Cms-Cms-Am-Cm-Cm- | 424/11 | UmsEVP-Ufs-Cm-Am-Um- | 490/24 |
| | DV25P | Uf-Um-Uf-Uf-Cf-Um- | | Uf-Am-Gm-Am-Am-Gm- | |
| | | Um-Cm-Um-Am-Af- | | Am-Am-Af-Am-Gf-Gm-Um- | |
| | | Um-Gm-Am-Am | | Gm-Gms-Gms-Am | |
| | C1576s- | Cms-Cms-Am-Cm-Cm- | 424/11 | UmsEVP-Ufs-Cm-Af-Uf-Uf- | 488/24 |
| | DV27P | Uf-Um-Uf-Uf-Cf-Um- | | Am-Gm-Am-Am-Gm-Am- | |
| | | Um-Cm-Um-Am-Af- | | Am-Af-Am-Gf-Gm-Um-Gm- | |
| | | Um-Gm-Am-Am | | Gms-Gms-Am | |
| | C1576s- | Cms-Cms-Am-Cm-Cm- | 425/11 | Ums-Ufs-Cm-Am-Um-Uf- | 491/24 |
| | DV22 | Uf-Um-Uf-Uf-Cf-Um- | | Am-Gm-Am-Am-Gm-Am- | |
| | | Um-Cm-Um-Am-Am- | | Am-Af-Am-Gf-Gm-Um-Gm- | |
| | | Um-Gm-Am-Am | | Gms-Gms-Am | |
| 1578s | C1578s- | Ams-Cms-Cm-Um-Um- | 426/12 | UmsEVP-Afs-Cm-Uf-Cf-Af- | 492/25 |
| | DV29P | Uf-Um-Cf-Um-Uf-Cm- | | Um-Um-Am-Gm-Am-Am- | |
| | | Um-Am-Am-Um-Gf- | | Gm-Af-Am-Af-Am-Gm-Gm- | |
| | | Am-Gm-Um-Am | | Ums-Gms-Gm | |
| | C1578s- | Ams-Cms-Cm-Um-Um- | 426/12 | UmsEVP-Afs-Cf-Uf-Cm-Af- | 493/25 |
| | DV28P | Uf-Um-Cf-Um-Uf-Cm- | | Um-Um-Am-Gm-Am-Am- | |
| | | Um-Am-Am-Um-Gf- | | Gm-Af-Am-Af-Am-Gm-Gm- | |
| | | Am-Gm-Um-Am | | Ums-Gms-Gm | |
| | C1578s- | Ams-Cms-Cm-Um-Um- | 427/12 | UmsEVP-Afs-Cf-Uf-Cm-Af- | 493/25 |
| | DV26P | Uf-Um-Cf-Uf-Uf-Cm- | | Um-Um-Am-Gm-Am-Am- | |
| | | Um-Am-Am-Um-Gf- | | Gm-Af-Am-Af-Am-Gm-Gm- | |
| | | Am-Gm-Um-Am | | Ums-Gms-Gm | |
| | C1578s- | Ams-Cms-Cm-Um-Um- | 427/12 | UmsEVP-Afs-Cm-Um-Cm- | 494/25 |
| | DV25P | Uf-Um-Cf-Uf-Uf-Cm- | | Af-Um-Um-Am-Gm-Am- | |
| | | Um-Am-Am-Um-Gf- | | Am-Gm-Af-Am-Af-Am-Gm- | |
| | | Am-Gm-Um-Am | | Gm-Ums-Gms-Gm | |
| | C1578s- | Ams-Cms-Cm-Um-Um- | 427/12 | UmsEVP-Afs-Cm-Uf-Cf-Af- | 492/25 |
| | DV27P | Uf-Um-Cf-Uf-Uf-Cm- | | Um-Um-Am-Gm-Am-Am- | |
| | | Um-Am-Am-Um-Gf- | | Gm-Af-Am-Af-Am-Gm-Gm- | |
| | | Am-Gm-Um-Am | | Ums-Gms-Gm | |
| | C1578s- | Ams-Cms-Cm-Um-Um- | 428/12 | Ums-Afs-Cm-Um-Cm-Af- | 495/25 |
| | DV22 | Uf-Um-Cf-Uf-Uf-Cm- | | Um-Um-Am-Gm-Am-Am- | |
| | | Um-Am-Am-Um-Gm- | | Gm-Af-Am-Af-Am-Gm-Gm- | |
| | | Am-Gm-Um-Am | | Ums-Gms-Gm | |
| 1838 | C1838- | Gms-Gms-Um-Um-Um- | 429/13 | UmsEVP-Ufs-Am-Uf-Af-Cf- | 496/26 |
| | DV29P | Um-Af-Am-Af-Am-Uf- | | Um-Um-Um-Am-Am-Um- | |
| | | Um-Am-Am-Am-Gm- | | Um-Uf-Um-Af-Am-Am-Am- | |
| | | Uf-Am-Um-Am-Am | | Cm-Cms-Cms-Am | |
| | C1838- | Gms-Gms-Um-Um-Um- | 429/13 | UmsEVP-Ufs-Af-Uf-Am-Cf- | 497/26 |
| | DV28P | Um-Af-Am-Af-Am-Uf- | | Um-Um-Um-Am-Am-Um- | |
| | | Um-Am-Am-Am-Gm- | | Um-Uf-Um-Af-Am-Am-Am- | |
| | | Uf-Am-Um-Am-Am | | Cm-Cms-Cms-Am | |
| | C1838- | Gms-Gms-Um-Um-Um- | 430/13 | UmsEVP-Ufs-Af-Uf-Am-Cf- | 497/26 |
| | DV26P | Um-Af-Am-Af-Af-Uf- | | Um-Um-Um-Am-Am-Um- | |
| | | Um-Am-Am-Am-Gm- | | Um-Uf-Um-Af-Am-Am-Am- | |
| | | Uf-Am-Um-Am-Am | | Cm-Cms-Cms-Am | |
| | C1838- | Gms-Gms-Um-Um-Um- | 430/13 | UmsEVP-Ufs-Am-Um-Am- | 498/26 |
| | DV25P | Um-Af-Am-Af-Af-Uf- | | Cf-Um-Um-Um-Am-Am- | |
| | | Um-Am-Am-Am-Gm- | | Um-Um-Uf-Um-Af-Am-Am- | |
| | | Uf-Am-Um-Am-Am | | Am-Cm-Cms-Cms-Am | |
| | C1838- | Gms-Gms-Um-Um-Um- | 430/13 | UmsEVP-Ufs-Am-Uf-Af-Cf- | 496/26 |
| | DV27P | Um-Af-Am-Af-Af-Uf- | | Um-Um-Um-Am-Am-Um- | |
| | | Um-Am-Am-Am-Gm- | | Um-Uf-Um-Af-Am-Am-Am- | |
| | | Uf-Am-Um-Am-Am | | Cm-Cms-Cms-Am | |
| | C1838- | Gms-Gms-Um-Um-Um- | 431/13 | Ums-Ufs-Am-Um-Am-Cf- | 499/26 |
| | DV22 | Um-Af-Am-Af-Af-Uf- | | Um-Um-Um-Am-Am-Um- | |
| | | Um-Am-Am-Am-Gm- | | Um-Uf-Um-Af-Am-Am-Am- | |
| | | Um-Am-Um-Am-Am | | Cm-Cms-Cms-Am | |

[0413] Cell type: HepG2 cell line.
[0414] Drug vehicle: sterile nuclease-free water, Gibco Opti-MEM.

### 2. Experimental Methods

[0415] The inhibitory effects of the test samples on the mRNA expression of AGT genes in HepG2 cell lines were tested by qRT-PCR.

### 2.1 Cell Culture

[0416] HepG2 cells in the logarithmic growth phase were harvested from subcultured stocks and cultured in DMEM medium containing 10% fetal bovine serum (supplemented with 100 μL/mL of penicillin and streptomycin). The cells were incubated in a cell culture incubator at 37° C. with 5% CO₂, with medium replaced daily. For subculture, the cells were digested with 0.25% trypsin, centrifuged at 1000 rpm for 5 minutes, and the supernatant was discarded. Fresh medium was added for subculture.

### 2.2 Cell Transfection

[0417] Preparation of transfection mixture: Lipofectamine RNAiMAX and Opti-MEM were mixed at a ratio of 2:98 and vortexed thoroughly.

[0418] Preparation of transfection reagent: 60 μL of siRNA solution diluted in Opti-MEM was mixed with 60 μL of the prepared transfection mixture at a ratio of 1:1 (v/v), vortexed thoroughly, and the mixture was incubated at room temperature for 15 minutes to obtain lipid nanoparticles (LNPs). A 12.5 μL aliquot was taken for encapsulation efficiency analysis.

[0419] Blank control transfection reagent: 60 μL of the prepared transfection mixture was added to 60 μL of Opti-MEM, vortexed thoroughly, and the mixture was incubated at room temperature for 15 minutes.

[0420] The prepared transfection reagent was added to a 24-well cell culture plate (100 μL per well), resulting in a final siRNA concentration of 0.02 nM per well. 500 μL of cell suspension (1.5×10⁵ cells per mL) was added per well. After mixing by crosswise method, the plate was incubated in a cell culture incubator at 37° C. with 5% CO₂ for 40 hours.

2.3 AGT mRNA Assay

[0421] The procedure was the same as that described in “2.3 AGT mRNA assay” in Example 2.

### 2.4 Data Processing

[0422] AGT mRNA expression rate (%) was calculated using the following formula:

$$Expression rate = ( AGT m R N A expression level / AGT m R N A expression level in blank control group ) \times 100 \% ;$$

$$Inhibition rate of AGT gene expression = 1 - expression rate ( \% ) .$$

2.5 IC₅₀ assay

[0423] In this experiment, the siRNA concentrations for the EC₅₀ assay started from 1.0 nM, with 4-fold dilutions, totaling 8 concentration points (1.0 nM, 0.25 nM, 0.0625 nM, 15.6 pM, 3.9 pM, 0.977 pM, 0.244 pM, and 0.061 pM). The inhibition rate of each sequence at each concentration was measured and plotted to calculate the IC₅₀ values.

### 3. Experimental Results

[0424] Following three independent experiments, the inhibition rates of modified sequence on AGT gene expression in HepG2 cells are shown in Tables 13 to 25.

[0425] The activity assay results demonstrated that all 13 candidate sequences (unmodified sequences 1576s, 1578s, 1838, 1835, 1816, 1812, 1579, 1836, 1789, 1839, 1791, 1795, and 1585s), when modified using the modification templates DV25P-29P and DV32P-34P designed in the present disclosure, exhibited significant inhibitory effects on AGT gene expression, with inhibition rates of 40% or more. Specifically, C1812-DV25P, C1579-DV33P, and C1789-DV26P achieved inhibition rates of 74.4%, 74.0%, and 73.6%, respectively.

[0426] The sequences modified using the modification templates DV25P-29P and DV32P-34P of the present disclosure showed a significant improvement in inhibition rate on AGT gene expression as compared to the alternately modified sequences. For example, the inhibition rate of unmodified sequence 1579 modified with template DV33P (C1579-DV33P) was 12.9% higher than that of the alternately modified sequence, while the inhibition rate of unmodified sequence 1812 modified with template DV25P (C1812-DV25P) was 11.5% higher than that of the alternately modified sequence.

[0427] Moreover, the same siRNA sequence exhibited significant differences in activity when modified with different modification templates. For example, unmodified sequence 1579 modified with template DV33P of the present disclosure exhibited a 29.8% increase in inhibition rate compared to the sequence modified with template DV28P of the present disclosure, and a 18.4% increase in inhibition rate compared to the sequence modified with the previously published Advanced ESC template DV22.

[0428] IC₅₀ assays demonstrated that sequences modified using the modification templates designed in the present disclosure exhibited IC₅₀ values ranging from 0.0019 to 0.0615 nM. For example, the IC₅₀ values of C1789-DV25P, C1812-DV25P, and C1789-DV26P were 0.0019 nM, 0.0022 nM, and 0.0026 nM, respectively. These sequences effectively inhibited AGT gene expression at low concentrations.

(i) Inhibitory Effect of Unmodified Sequences on AGT Gene Expression after Template Modification

### (1) Unmodified Sequence 1576s

TABLE 13
Inhibition rates of unmodified sequence 1576s on
AGT gene expression after template modification

| | | | Inhibition rate (%) | Increase in inhibition |
|---|---|---|---|---|
| | Template- | Inhibition rate | of corresponding | rate relative to |
| Unmodified | modified | (%) of template- | alternately | alternately modified |
| sequence ID | sequence ID | modified sequence | modified sequence | sequence (%) |
| 1576s | C1576s-DV26P | 73.4 | 64.6 | 8.8 |
| | C1576s-DV28P | 58.8 | | −5.8 |
| | C1576s-DV29P | 79.3 | | 14.7 |
| | C1576s-DV25P | 73.3 | | 8.7 |
| | C1576s-DV27P | 69.7 | | 5.1 |
| | C1576s-DV22 | 63.9 | | −0.7 |

### I. Templates DV25P-29P of the Present Disclosure

[0429] When modified with templates DV25, DV26, and DV29 designed in the present disclosure, unmodified sequence 1576s exhibited inhibition rates exceeding 70% on AGT gene expression, indicating a significant improvement as compared to 2′-O-methyl and 2′-fluoro alternating modifications. For example, after modification with templates DV25P and DV29P, the inhibition rates of C1576s-DV25P and C1576s-DV29P increased by 8.7% and 14.7%, respectively.

### II. Advanced ESC Template DV22 Disclosed in the Prior Art (Fluorine-Substituted Sites: Positions 2, 6, 14, and 16 on the Antisense Strand; Positions 7, 9, 10, and 11 on the Sense Strand)

[0430] When unmodified sequence 1576s was modified with template DV22, the resulting sequence C1576s-DV22 exhibited an inhibition rate of 63.9% on AGT gene expression, which was 0.7% lower than that of the alternately modified sequence.

[0431] After modification with templates DV25P and DV29P of the present disclosure, the inhibition rates of C1576s-DV25P and C1576s-DV29P were 9.4% and 15.4% higher, respectively, than that of C1576s-DV22, indicating a significant improvement.

Thus, it can be Concluded that:
[0432] 1) When modified with templates DV25-29 of the present disclosure, unmodified sequence 1576s exhibited significantly enhanced inhibitory effect on AGT gene expression compared to the alternately modified sequence. For example, when unmodified sequence 1576s was modified with DV26, the inhibition rate increased by 8.8% compared to the alternately modified sequence.
[0433] 2) The same siRNA sequence exhibited significant differences in activity when modified with different modification templates. For example, when unmodified sequence 1576s was modified with templates DV25P and DV29P of the present disclosure, the inhibition rate increased by up to 20.5% compared to modification with template DV28P of the present disclosure, indicating a significant improvement; the inhibition rate increased by up to 15.4% compared to modification with the previously published Advanced ESC template DV22, indicating a significant improvement.
[0434] 3) The activity of siRNA sequences modified with different templates varied greatly, with differences of up to 20.5%. Thus, it is uncertain which modification template would confer high activity to an siRNA sequence.

### (2) Unmodified Sequence 1578s

TABLE 14
Inhibition rates of unmodified sequence 1579 on
AGT gene expression after template modification

| | | | Inhibition rate (%) | Increase in inhibition |
|---|---|---|---|---|
| | Template- | Inhibition rate | of corresponding | rate relative to |
| Unmodified | modified | (%) of template- | alternately | alternately modified |
| sequence ID | sequence ID | modified sequence | modified sequence | sequence (%) |
| 1578s | C1578s-DV26P | 69.7 | 63.9 | 5.8 |
| | C1578s-DV28P | 56.9 | | −7.0 |
| | C1578s-DV29P | 77.1 | | 13.2 |
| | C1578s-DV25P | 75.8 | | 11.9 |
| | C1578s-DV27P | 73.1 | | 9.2 |
| | C1578s-DV22 | 61.1 | | −2.8 |

### I. Templates DV25P-29P of the Present Disclosure

[0435] When modified with templates DV25P, DV27P, and DV29P designed in the present disclosure, unmodified sequence 1578s exhibited inhibition rates exceeding 70% on AGT gene expression, indicating a significant improvement as compared to 2′-O-methyl and 2′-fluoro alternating modifications. For example, after modification with templates DV25P and DV29P, the inhibition rates of C1578s-DV25P and C1578s-DV29P increased by 11.9% and 13.2%, respectively.

### II. Advanced ESC Template DV22 Disclosed in the Prior Art (Fluorine-Substituted Sites: Positions 2, 6, 14, and 16 on the Antisense Strand; Positions 7, 9, 10, and 11 on the Sense Strand)

[0436] When unmodified sequence 1578s was modified with template DV22, the resulting sequence C1578s-DV22 exhibited an inhibition rate of 61.1% on AGT gene expression, which was 2.8% lower than that of the alternately modified sequence.

[0437] After modification with templates DV25P and DV29P of the present disclosure, the inhibition rates of C1578s-DV25P and C1578s-DV29P were 14.7% and 16.0% higher, respectively, than that of C1578s-DV22, indicating a significant improvement.

Thus, it can be Concluded that:
[0438] 1) When modified with templates DV25P-29P of the present disclosure, unmodified sequence 1578s exhibited significantly enhanced inhibitory effect on AGT gene expression compared to the alternately modified sequence. For example, when unmodified sequence 1578s was modified with DV27P, the inhibition rate increased by 9.2% compared to the alternately modified sequence.
[0439] 2) The same siRNA sequence exhibited significant differences in activity when modified with different modification templates. For example, when unmodified sequence 1578s was modified with templates DV25P and DV29P of the present disclosure, the inhibition rate increased by up to 20.2% compared to modification with template DV28P of the present disclosure, indicating a significant improvement; the inhibition rate increased by up to 16.0% compared to modification with the previously published Advanced ESC template DV22, indicating a significant improvement.
[0440] 3) The activity of siRNA sequences modified with different templates varied greatly, with differences of up to 20.2%. Thus, it is uncertain which modification template would confer high activity to an siRNA sequence.

### (3) Unmodified Sequence 1838

TABLE 15
Inhibition rates of unmodified sequence 1579 on
AGT gene expression after template modification

| | | | Inhibition rate (%) | Increase in inhibition |
|---|---|---|---|---|
| | Template- | Inhibition rate | of corresponding | rate relative to |
| Unmodified | modified | (%) of template- | alternately | alternately modified |
| sequence ID | sequence ID | modified sequence | modified sequence | sequence (%) |
| 1838 | C1838-DV26P | 67.2 | 63.6 | 3.6 |
| | C1838-DV28P | 60.3 | | −3.3 |
| | C1838-DV29P | 75.6 | | 12.0 |
| | C1838-DV25P | 69.3 | | 5.7 |
| | C1838-DV27P | 72.3 | | 8.7 |
| | C1838-DV22 | 62.7 | | −0.9 |

### I. Templates DV25P-29P of the Present Disclosure

[0441] When modified with templates DV27P and DV29P designed in the present disclosure, unmodified sequence 1838 exhibited inhibition rates exceeding 70% on AGT gene expression, indicating a significant improvement as compared to 2′-O-methyl and 2′-fluoro alternating modifications. For example, after modification with templates DV27P and DV29P, the inhibition rates of C1838-DV27P and C1838-DV29P increased by 8.7% and 12.0%, respectively.

### II. Advanced ESC Template DV22 Disclosed in the Prior Art (Fluorine-Substituted Sites: Positions 2, 6, 14, and 16 on the Antisense Strand; Positions 7, 9, 10, and 11 on the Sense Strand)

[0442] When unmodified sequence 1838 was modified with template DV22, the resulting sequence C1838-DV22 exhibited an inhibition rate of 62.7% on AGT gene expression, which was 0.9% lower than that of the alternately modified sequence.

[0443] After modification with templates DV27P and DV29P of the present disclosure, the inhibition rates of C1838-DV27P and C1838-DV29P were 9.6% and 12.9% higher, respectively, than that of C1838-DV22, indicating a significant improvement.

Thus, it can be Concluded that:
[0444] 1) When modified with templates DV25P-29P of the present disclosure, unmodified sequence 1838 exhibited significantly enhanced inhibitory effect on AGT gene expression compared to the alternately modified sequence. For example, when unmodified sequence 1838 was modified with DV27P, the inhibition rate increased by 8.7% compared to the alternately modified sequence.
[0445] 2) The same siRNA sequence exhibited significant differences in activity when modified with different modification templates. For example, when unmodified sequence 1838 was modified with templates DV27P and DV29P of the present disclosure, the inhibition rate increased by up to 15.3% compared to modification with template DV28P of the present disclosure, indicating a significant improvement; the inhibition rate increased by up to 12.9% compared to modification with the previously published Advanced ESC template DV22, indicating a significant improvement.
[0446] 3) The activity of siRNA sequences modified with different templates varied greatly, with differences of up to 15.3%. Thus, it is uncertain which modification template would confer high activity to an siRNA sequence.

### (4) Unmodified Sequence 1579

TABLE 16
Inhibition rates of unmodified sequence 1579 on
AGT gene expression after template modification

| | | | Inhibition | |
|---|---|---|---|---|
| | | Inhibition | of rate (%) | |
| | | rate (%) | corresponding | |
| | Template- | of template- | alternately | |
| Unmodified | modified | modified | modified | Increase |
| sequence ID | sequence ID | sequence | sequence | (%) |
| 1579 | C1579-DV25P | 72.2 | 61.1 | 11.1 |
| | C1579-DV26P | 70.8 | | 9.7 |
| | C1579-DV27P | 63.3 | | 2.2 |
| | C1579-DV28P | 44.2 | | −16.9 |
| | C1579-DV29P | 71.7 | | 10.6 |
| | C1579-DV32P | 68.9 | | 7.8 |
| | C1579-DV33P | 74.0 | | 12.9 |
| | C1579-DV34P | 63.9 | | 2.8 |
| | C1579-DV22 | 55.6 | | −5.5 |

### I. Templates DV25P-29P of the Present Disclosure

[0447] When modified with templates DV25P, DV26P, and DV29P designed in the present disclosure, unmodified sequence 1579 exhibited inhibition rates exceeding 70% on AGT gene expression, indicating a significant improvement as compared to 2′-O-methyl and 2′-fluoro alternating modifications. For example, after modification with templates DV25P and DV29P, the inhibition rates of C1579-DV25P and C1579-DV29P increased by 11.1% and 10.6%, respectively (FIG. 7).

### II. Other Modification Templates of the Present Disclosure

[0448] When unmodified sequence 1579 was modified with templates DV32P, DV33P, and DV34P, the resulting sequences C1579-DV32P, C1579-DV33P, and C1579-DV34P exhibited inhibition rates of 68.9%, 74.0%, and 63.9% on AGT gene expression, respectively, which were 7.8%, 12.9%, and 2.8% higher than those of the corresponding alternately modified sequences, respectively.

[0449] After modification with templates DV25P and DV29P of the present disclosure, the inhibition rates of C1579-DV25P and C1579-DV29P increased by 3.3% and 2.8%, respectively, compared to C1579-DV32P, decreased by 1.8% and 2.3%, respectively, compared to C1579-DV33P, and increased by 8.3% and 7.8%, respectively, compared to C1579-DV34P.

### III. Advanced ESC Template DV22 Disclosed in the Prior Art (Fluorine-Substituted Sites: Positions 2, 6, 14, and 16 on the Antisense Strand; Positions 7, 9, 10, and 11 on the Sense Strand)

[0450] When unmodified sequence 1579 was modified with template DV22, the resulting sequence C1579-DV22 exhibited an inhibition rate of 55.6% on AGT gene expression, which was 5.5% lower than that of the alternately modified sequence.

[0451] After modification with templates DV25P and DV29P of the present disclosure, the inhibition rates of C1579-DV25P and C1579-DV29P were 16.6% and 16.1% higher, respectively, than that of C1579-DV22, indicating a significant improvement.

Thus, it can be Concluded that:
[0452] 1) When modified with templates DV25-29 of the present disclosure, unmodified sequence 1579 exhibited significantly enhanced inhibitory effect on AGT gene expression compared to the alternately modified sequence. For example, when unmodified sequence 1579 was modified with DV26, the inhibition rate increased by 9.7% compared to the alternately modified sequence.
[0453] 2) The same siRNA sequence exhibited significant differences in activity when modified with different modification templates. For example, when unmodified sequence 1579 was modified with templates DV25P and DV29P of the present disclosure, the inhibition rate increased by up to 28.0% compared to modification with template DV28P of the present disclosure, indicating a significant improvement; the inhibition rate increased by up to 16.6% compared to modification with the previously published Advanced ESC template DV22, indicating a significant improvement.
[0454] 3) The activity of siRNA sequences modified with different templates varied greatly, with differences of up to 28.0%. Thus, it is uncertain which modification template would confer high activity to an siRNA sequence.

### (5) Unmodified Sequence 1585s

TABLE 17
Inhibition rates of unmodified sequence 1585s on
AGT gene expression after template modification

| | | | Inhibition | |
|---|---|---|---|---|
| | | Inhibition | of rate (%) | |
| | | rate (%) | corresponding | |
| | Template- | of template- | alternately | |
| Unmodified | modified | modified | modified | Increase |
| sequence ID | sequence ID | sequence | sequence | (%) |
| 1585s | C1585s-DV26P | 62.6 | 59.3 | 3.3 |
| | C1585s-DV27P | 64.6 | | 5.3 |
| | C1585s-DV28P | 49.5 | | −9.8 |
| | C1585s-DV29P | 59.2 | | −0.1 |
| | C1585s-DV32P | 61.8 | | 2.5 |
| | C1585s-DV34P | 54.1 | | −5.2 |
| | C1585s-DV22 | 55.2 | | −4.1 |

### I. Templates DV26P-29P of the Present Disclosure

[0455] When modified with templates DV26P, DV27P, and DV29P designed in the present disclosure, unmodified sequence 1585s exhibited inhibition rates exceeding 50% on AGT gene expression, indicating a significant improvement as compared to 2′-O-methyl and 2′-fluoro alternating modifications. For example, after modification with templates DV26P and DV27P, the inhibition rates of C1585s-DV26P and C1585s-DV27P increased by 3.3% and 5.3%, respectively.

### II. Other Modification Templates of the Present Disclosure

[0456] When unmodified sequence 1585s was modified with templates DV32P and DV34P, the resulting sequences C1585s-DV32P and C1585s-DV34P exhibited inhibition rates of 61.8% and 54.1% on AGT gene expression, respectively, which were 2.5% and −5.2% higher than those of the corresponding alternately modified sequences, respectively.

[0457] After modification with templates DV26P and DV27P of the present disclosure, the inhibition rates of C1585s-DV26P and C1585s-DV27P increased by 0.8% and 2.8%, respectively, compared to C1585s-DV32P, and increased by 8.5% and 10.5%, respectively, compared to C1585s-DV34P.

### III. Advanced ESC Template DV22 Disclosed in the Prior Art (Fluorine-Substituted Sites: Positions 2, 6, 14, and 16 on the Antisense Strand; Positions 7, 9, 10, and 11 on the Sense Strand)

[0458] When unmodified sequence 1585s was modified with template DV22, the resulting sequence C1585s-DV22 exhibited an inhibition rate of 55.2% on AGT gene expression, which was 4.1% lower than that of the alternately modified sequence.

[0459] After modification with templates DV26P and DV27P of the present disclosure, the inhibition rates of C1585s-DV26P and C1585s-DV27P were 7.4% and 9.4% higher, respectively, than that of C1585s-DV22, indicating a significant improvement.

Thus, it can be Concluded that:
[0460] 1) When modified with templates DV26P-29P of the present disclosure, unmodified sequence 1585s exhibited significantly enhanced inhibitory effect on AGT gene expression compared to the alternately modified sequence. For example, when unmodified sequence 1585s was modified with DV27P, the inhibition rate increased by 5.3% compared to the alternately modified sequence.
[0461] 2) The same siRNA sequence exhibited significant differences in activity when modified with different modification templates. For example, when unmodified sequence 51 was modified with template DV27P of the present disclosure, the inhibition rate increased by 15.1% compared to modification with template DV28P of the present disclosure, indicating a significant improvement; the inhibition rate increased by up to 9.4% compared to modification with the previously published Advanced ESC template DV22, indicating a significant improvement.
[0462] 3) The activity of siRNA sequences modified with different templates varied greatly, with differences of up to 15.1%. Thus, it is uncertain which modification template would confer high activity to an siRNA sequence.

### (6) Unmodified Sequence 1789

TABLE 18
Inhibition rates of unmodified sequence 1789 on
AGT gene expression after template modification

| | | | Inhibition | |
|---|---|---|---|---|
| | | Inhibition | of rate (%) | |
| | | rate (%) | corresponding | |
| | Template- | of template- | alternately | |
| Unmodified | modified | modified | modified | Increase |
| sequence ID | sequence ID | sequence | sequence | (%) |
| 1789 | C1789-DV25P | 69.0 | 63.5 | 5.5 |
| | C1789-DV26P | 73.6 | | 10.1 |
| | C1789-DV27P | 66.3 | | 2.8 |
| | C1789-DV28P | 63.1 | | −0.4 |
| | C1789-DV29P | 64.5 | | 1 |
| | C1789-DV32P | 61.8 | | −1.7 |
| | C1789-DV33P | 57.9 | | −5.6 |
| | C1789-DV34P | 56.9 | | −6.6 |
| | C1789-DV22 | 60.3 | | −3.2 |

I. Modification with Templates DV25P-29P of the Present Disclosure

[0463] When modified with templates DV25P-29P designed in the present disclosure, unmodified sequence 1789 exhibited inhibition rates exceeding 60% on AGT gene expression, indicating an improvement as compared to 2′-O-methyl and 2′-fluoro alternating modifications. For example, after modification with templates DV25P and DV26P, the inhibition rates of C1789-DV25P and C1789-DV26P increased by 5.5% and 10.1%, respectively.

### II. Other Modification Templates of the Present Disclosure

[0464] When unmodified sequence 1789 was modified with templates DV32P-34P, the resulting sequences C1789-DV32P, C1789-DV33P, and C1789-DV34P exhibited inhibition rates of 61.8%, 57.9%, and 56.9% on AGT gene expression, respectively, which were 1.7%, 5.6%, and 6.6% lower than those of the corresponding alternately modified sequences, respectively.

[0465] After modification with templates DV25P and DV26P of the present disclosure, the inhibition rates of C1789-DV25P and C1789-DV26P increased by 7.2% and 11.8%, respectively, compared to C1789-DV32P, increased by 11.1% and 15.7%, respectively, compared to C1789-DV33P, and increased by 12.1% and 16.7%, respectively, compared to C1789-DV34P.

### III. Advanced ESC Template DV22 Disclosed in the Prior Art (Fluorine-Substituted Sites: Positions 2, 6, 14, and 16 on the Antisense Strand; Positions 7, 9, 10, and 11 on the Sense Strand)

[0466] When unmodified sequence 1789 was modified with template DV22, the resulting sequence C1789-DV22 exhibited an inhibition rate of 60.3% on AGT gene expression, which was 3.2% lower than that of the alternately modified sequence.

[0467] After modification with templates DV25P and DV26P of the present disclosure, the inhibition rates of C1789-DV25P and C1789-DV26P were 8.7% and 13.3% higher, respectively, than that of C1789-DV22, indicating a significant improvement.

Thus, it can be Concluded that:
[0468] 1) When modified with templates DV25P-29P of the present disclosure, unmodified sequence 1789 exhibited significantly enhanced inhibitory effect on AGT gene expression compared to the alternately modified sequence. For example, when unmodified sequence 81 was modified with DV26P, the inhibition rate increased by 10.1% compared to the alternately modified sequence.
[0469] 2) The same siRNA sequence exhibited significant differences in activity when modified with different modification templates. For example, when unmodified sequence 1789 was modified with templates DV25P and DV26P of the present disclosure, the inhibition rate increased by up to 16.7% compared to modification with templates DV32P-34P of the present disclosure, indicating a significant improvement; the inhibition rate increased by up to 13.3% compared to modification with the previously published Advanced ESC template DV22, indicating a significant improvement.
[0470] 3) The activity of siRNA sequences modified with different templates varied greatly, with differences of up to 16.7%. Thus, it is uncertain which modification template would confer high activity to an siRNA sequence.

### (7) Unmodified Sequence 1791

TABLE 19
Inhibition rates of unmodified sequence 1791 on
AGT gene expression after template modification

| | | | Inhibition | |
|---|---|---|---|---|
| | | Inhibition | of rate (%) | |
| | | rate (%) | corresponding | |
| | Template- | of template- | alternately | |
| Unmodified | modified | modified | modified | Increase |
| sequence ID | sequence ID | sequence | sequence | (%) |
| 1791 | C1791-DV26P | 70.3 | 61.8 | 8.5 |
| | C1791-DV27P | 63.6 | | 1.8 |
| | C1791-DV28P | 64.6 | | 2.8 |
| | C1791-DV29P | 59.4 | | −2.4 |
| | C1791-DV32P | 65.9 | | 4.1 |
| | C1791-DV34P | 66.7 | | 4.9 |

### I. Templates DV26P-29P of the Present Disclosure

[0471] When modified with templates DV26-29P designed in the present disclosure, unmodified sequence 1791 exhibited inhibition rates exceeding 55% on AGT gene expression, indicating a significant improvement as compared to 2′-O-methyl and 2′-fluoro alternating modifications. For example, after modification with templates DV26P and DV28P, the inhibition rates of C1791-DV26P and C1791-DV28P increased by 8.5% and 2.8%, respectively.

### II. Other Modification Templates of the Present Disclosure

[0472] When unmodified sequence 1791 was modified with templates DV32P and DV34P, the resulting sequences C1791-DV32P and C1791-DV34P exhibited inhibition rates of 65.9% and 66.7% on AGT gene expression, respectively, which were 4.1% and 4.9% higher than those of 2′-O-methyl and 2′-fluoro alternating modifications, respectively.

[0473] After modification with template DV26P of the present disclosure, the inhibition rate of C1791-DV26P increased by 4.4% and 3.6% compared to C1791-DV32P and C1791-DV34P, respectively.

Thus, it can be Concluded that:
[0474] 1) When modified with templates DV26-29P of the present disclosure, unmodified sequence 1791 exhibited significantly enhanced inhibitory effect on AGT gene expression compared to the alternately modified sequence. For example, when unmodified sequence 1791 was modified with DV26P, the inhibition rate increased by 8.5% compared to the alternately modified sequence.
[0475] 2) The same siRNA sequence exhibited significant differences in activity when modified with different modification templates. For example, unmodified sequence 1791 modified with template DV26P of the present disclosure exhibited a 10.9% increase in inhibition rate compared to the sequence modified with template DV29P of the present disclosure, indicating a significant improvement.
[0476] 3) The activity of siRNA sequences modified with different templates varied greatly, with differences of up to 10.9%. Thus, it is uncertain which modification template would confer high activity to an siRNA sequence.

### (8) Unmodified Sequence 1795

TABLE 20
Inhibition rates of unmodified sequence 1795 on
AGT gene expression after template modification

| | | | Inhibition | |
|---|---|---|---|---|
| | | | rate (%) of | |
| | | Inhibition | corresponding | |
| | | rate (%) of | alternately | |
| | Template- | template- | modified | |
| Unmodified | modified | modified | sequence | Increase |
| sequence ID | sequence ID | sequence | Increase (%) | (%) |
| 1795 | C1795-DV26P | 59.3 | 57.5 | 1.8 |
| | C1795-DV27P | 63.3 | | 5.8 |
| | C1795-DV28P | 51.9 | | −5.6 |
| | C1795-DV29P | 61.6 | | 4.1 |
| | C1795-DV32P | 55.8 | | −1.7 |
| | C1795-DV34P | 55.0 | | −2.5 |

### I. Templates DV25-29P of the Present Disclosure

[0477] When modified with templates DV26-29P designed in the present disclosure, unmodified sequence 1795 exhibited inhibition rates exceeding 50% on AGT gene expression, indicating an improvement as compared to 2′-O-methyl and 2′-fluoro alternating modifications. For example, after modification with templates DV27P and DV29P, the inhibition rates of C1795-DV27P and C1795-DV29P increased by 5.8% and 4.1%, respectively.

### II. Other Modification Templates of the Present Disclosure

[0478] When unmodified sequence 1795 was modified with templates DV32P and DV34P, the resulting sequences C1795-DV32P and C1795-DV34P exhibited inhibition rates of 55.8% and 55.0% on AGT gene expression, respectively, which were 1.7% and 2.5% lower than those of the corresponding alternately modified sequences, respectively.

[0479] After modification with templates DV27P and DV29P of the present disclosure, the inhibition rates of C1795-DV27P and C1795-DV29P increased by 7.5% and 5.8%, respectively, compared to C1795-DV32P, and increased by 8.3% and 6.6%, respectively, compared to C1795-DV34P.

Thus, it can be Concluded that:
[0480] 1) When modified with templates DV25-29P of the present disclosure, unmodified sequence 1795 exhibited significantly enhanced inhibitory effect on AGT gene expression compared to the alternately modified sequence. For example, when unmodified sequence 84 was modified with DV27P, the inhibition rate increased by 5.8% compared to the alternately modified sequence.
[0481] 2) The same siRNA sequence exhibited significant differences in activity when modified with different modification templates. For example, unmodified sequence 1795 modified with template DV27P of the present disclosure exhibited a 11.4% increase in inhibition rate compared to the sequence modified with template DV28P of the present disclosure, indicating a significant improvement.
[0482] 3) The activity of siRNA sequences modified with different templates varied greatly, with differences of up to 11.4%. Thus, it is uncertain which modification template would confer high activity to an siRNA sequence.

### (9) Unmodified Sequence 1812

TABLE 21
Inhibition rates of unmodified sequence 1812 on
AGT gene expression after template modification

| | | | Inhibition | |
|---|---|---|---|---|
| | | Inhibition | of rate (%) | |
| | | rate (%) of | corresponding | |
| | Template- | template- | alternately | |
| Unmodified | modified | modified | modified | Increase |
| sequence ID | sequence ID | sequence | sequence | (%) |
| 1812 | C1812-DV25P | 74.4 | 62.9 | 11.5 |
| | C1812-DV26P | 58.0 | | −4.9 |
| | C1812-DV27P | 63.9 | | 1.0 |
| | C1812-DV28P | 55.3 | | −7.6 |
| | C1812-DV29P | 66.9 | | 4.0 |
| | C1812-DV32P | 63.6 | | 0.7 |
| | C1812-DV33P | 54.2 | | −8.7 |
| | C1812-DV34P | 60.7 | | −2.2 |
| | C1812-DV22 | 63.6 | | 0.7 |

I. Modification with Templates DV25P-29P of the Present Disclosure

[0483] When modified with templates DV25P-29P designed in the present disclosure, unmodified sequence 1812 exhibited inhibition rates exceeding 55% on AGT gene expression, indicating an improvement as compared to 2′-O-methyl and 2′-fluoro alternating modifications. For example, after modification with template DV25P, the inhibition rate of C1812-DV25P increased by 11.5%.

### II. Other Modification Templates of the Present Disclosure

[0484] When unmodified sequence 1812 was modified with templates DV32P-34P, the resulting sequences C1812-DV32P, C1812-DV33P, and C1812-DV34P exhibited inhibition rates of 63.6%, 54.2%, and 60.7% on AGT gene expression, respectively, which were 0.7%, −8.7%, and −2.2% higher than those of the corresponding alternately modified sequences, respectively.

[0485] After modification with template DV25P of the present disclosure, the inhibition rate of C1812-DV25P increased by 10.8%, 20.2%, and 13.7% compared to C1812-DV32P, C1812-DV33P, and C1812-DV34P, respectively, indicating a significant improvement.

### III. Advanced ESC Template DV22 Disclosed in the Prior Art (Fluorine-Substituted Sites: Positions 2, 6, 14, and 16 on the Antisense Strand; Positions 7, 9, 10, and 11 on the Sense Strand)

[0486] When unmodified sequence 1812 was modified with template DV22, the resulting sequence C812-DV22 exhibited an inhibition rate of 63.6% on AGT gene expression, which was 0.7% higher than that of the alternately modified sequence.

[0487] After modification with template DV25P of the present disclosure, the inhibition rate of C1812-DV25P increased by 10.8% compared to C1812-DV22, indicating a significant improvement.

Thus, it can be Concluded that:
[0488] 1) When modified with templates DV25-29P of the present disclosure, unmodified sequence 1812 exhibited significantly enhanced inhibitory effect on AGT gene expression compared to the alternately modified sequence. For example, when unmodified sequence 1812 was modified with DV25P, the inhibition rate increased by 11.5% compared to the alternately modified sequence.
[0489] 2) The same siRNA sequence exhibited significant differences in activity when modified with different modification templates. For example, when unmodified sequence 1812 was modified with template DV25P of the present disclosure, the inhibition rate increased by 20.2% compared to modification with template DV33P of the present disclosure, indicating a significant improvement; the inhibition rate increased by up to 10.8% compared to modification with the previously published Advanced ESC template DV22, indicating a significant improvement.
[0490] 3) The activity of siRNA sequences modified with different templates varied greatly, with differences of up to 20.2%. Thus, it is uncertain which modification template would confer high activity to an siRNA sequence.

### (10) Unmodified Sequence 1816

TABLE 22
Inhibition rates of unmodified sequence 1816 on
AGT gene expression after template modification

| | | | Inhibition | |
|---|---|---|---|---|
| | | Inhibition | of rate (%) | |
| | | rate (%) of | corresponding | |
| | Template- | template- | alternately | |
| Unmodified | modified | modified | modified | Increase |
| sequence ID | sequence ID | sequence | sequence | (%) |
| 1816 | C1816-DV25P | 68.1 | 60.9 | 7.2 |
| | C1816-DV26P | 58.5 | | −2.4 |
| | C1816-DV27P | 64.5 | | 3.6 |
| | C1816-DV28P | 49.2 | | −11.7 |
| | C1816-DV29P | 68.5 | | 7.6 |
| | C1816-DV32P | 58.6 | | −2.3 |
| | C1816-DV33P | 48.4 | | −12.5 |
| | C1816-DV34P | 38.5 | | −22.4 |
| | C1816-DV22 | 66.7 | | 5.8 |

I. Modification with Templates DV25P-29P of the Present Disclosure

[0491] When modified with templates DV25P, DV26P, DV27P, and DV29P designed in the present disclosure, unmodified sequence 1816 exhibited inhibition rates exceeding 55% on AGT gene expression, indicating an improvement as compared to 2′-O-methyl and 2′-fluoro alternating modifications. For example, after modification with template DV29P, the inhibition rate of C1812-DV25P increased by 7.6%.

### II. Other Modification Templates of the Present Disclosure

[0492] When unmodified sequence 1816 was modified with templates DV32P-34P, the resulting sequences C1816-DV32P, C1816-DV33P, and C1816-DV34P exhibited inhibition rates of 58.6%, 48.4%, and 38.5% on AGT gene expression, respectively, which were 2.3%, 12.5%, and 22.4% lower than those of the corresponding alternately modified sequences, respectively.

[0493] After modification with template DV29P of the present disclosure, the inhibition rate of C1816-DV25P increased by 9.9%, 20.1%, and 30.0% compared to C1816-DV32P, C1816-DV33P, and C1816-DV34P, respectively, indicating a significant improvement.

### III. Advanced ESC Template DV22 Disclosed in the Prior Art (Fluorine-Substituted Sites: Positions 2, 6, 14, and 16 on the Antisense Strand; Positions 7, 9, 10, and 11 on the Sense Strand)

[0494] When unmodified sequence 1816 was modified with template DV22, the resulting sequence C1816-DV22 exhibited an inhibition rate of 66.7% on AGT gene expression, which was 5.8% higher than that of the alternately modified sequence.

[0495] After modification with template DV29P of the present disclosure, the inhibition rate of C1816-DV29P increased by 1.8% compared to C1816-DV22.

Thus, it can be Concluded that:
[0496] 1) When modified with templates DV25P-29P of the present disclosure, unmodified sequence 1816 exhibited significantly enhanced inhibitory effect on AGT gene expression compared to the alternately modified sequence. For example, when unmodified sequence 1816 was modified with DV29P, the inhibition rate increased by 7.6% compared to the alternately modified sequence.
[0497] 2) The same siRNA sequence exhibited significant differences in activity when modified with different modification templates. For example, when unmodified sequence 1816 was modified with template DV29P of the present disclosure, the inhibition rate increased by 30.0% compared to modification with template DV34P of the present disclosure, indicating a significant improvement; the inhibition rate increased by 1.8% compared to modification with the previously published Advanced ESC template DV22.
[0498] 3) The activity of siRNA sequences modified with different templates varied greatly, with differences of up to 30.0%. Thus, it is uncertain which modification template would confer high activity to an siRNA sequence.

### (11) Unmodified Sequence 1835

TABLE 23
Inhibition rates of unmodified sequence 1835 on
AGT gene expression after template modification

| | | | Inhibition | |
|---|---|---|---|---|
| | | Inhibition | of rate (%) | |
| | | rate (%) of | corresponding | |
| | Template- | template- | alternately | |
| Unmodified | modified | modified | modified | Increase |
| sequence ID | sequence ID | sequence | sequence | (%) |
| 1835 | C1835-DV25P | 68.2 | 62.3 | 5.9 |
| | C1835-DV26P | 71.8 | | 9.5 |
| | C1835-DV27P | 51.2 | | −11.1 |
| | C1835-DV28P | 70.0 | | 7.7 |
| | C1835-DV29P | 64.9 | | 2.6 |
| | C1835-DV32P | 53.3 | | −9.0 |
| | C1835-DV33P | 64.9 | | 2.6 |
| | C1835-DV34P | 71.8 | | 9.5 |
| | C1835-DV22 | 58.2 | | −4.1 |

I. Modification with Templates DV25P-29P of the Present Disclosure

[0499] When modified with templates DV25P-29P designed in the present disclosure, unmodified sequence 1835 exhibited inhibition rates exceeding 50% on AGT gene expression, except for DV27P, indicating an improvement as compared to 2′-O-methyl and 2′-fluoro alternating modifications. For example, after modification with template DV26P, the inhibition rate of C1835-DV26P increased by 9.5%.

### II. Other Modification Templates of the Present Disclosure

[0500] When unmodified sequence 1835 was modified with templates DV32P-34P, the resulting sequences C1835-DV32P, C1835-DV33P, and C1835-DV34P exhibited inhibition rates of 53.3%, 64.9%, and 71.8% on AGT gene expression, respectively, which were −9.0%, 2.6%, and 9.5% higher than those of the corresponding alternately modified sequences, respectively.

[0501] After modification with template DV26P of the present disclosure, the inhibition rate of C1835-DV26P increased by 18.5%, 10.7%, and 0.0% compared to C1835-DV32P, C1835-DV33P, and C1835-DV34P, respectively.

### III. Advanced ESC Template DV22 Disclosed in the Prior Art (Fluorine-Substituted Sites: Positions 2, 6, 14, and 16 on the Antisense Strand; Positions 7, 9, 10, and 11 on the Sense Strand)

[0502] When unmodified sequence 1835 was modified with template DV22, the resulting sequence C1835-DV22 exhibited an inhibition rate of 58.2% on AGT gene expression, which was 4.1% lower than that of the alternately modified sequence.

[0503] After modification with template DV25P of the present disclosure, the inhibition rate of C1835-DV26P increased by 13.6% compared to C1835-DV22, indicating a significant improvement.

Thus, it can be Concluded that:
[0504] 1) When modified with templates DV25-29P of the present disclosure, unmodified sequence 1835 exhibited significantly enhanced inhibitory effect on AGT gene expression compared to the alternately modified sequence. For example, when unmodified sequence 1835 was modified with DV26P, the inhibition rate increased by 9.5% compared to the alternately modified sequence.
[0505] 2) The same siRNA sequence exhibited significant differences in activity when modified with different modification templates. For example, when unmodified sequence 1835 was modified with template DV26P of the present disclosure, the inhibition rate increased by 20.6% compared to modification with template DV27P of the present disclosure, indicating a significant improvement; the inhibition rate increased by up to 13.6% compared to modification with the previously published Advanced ESC template DV22, indicating a significant improvement.
[0506] 3) The activity of siRNA sequences modified with different templates varied greatly, with differences of up to 20.6%. Thus, it is uncertain which modification template would confer high activity to an siRNA sequence.

### (12) Unmodified Sequence 1836

TABLE 24
Inhibition rates of unmodified sequence 1836 on
AGT gene expression after template modification

| | | | Inhibition | |
|---|---|---|---|---|
| | | Inhibition | of rate (%) | |
| | | rate (%) of | corresponding | |
| | Template- | template- | alternately | |
| Unmodified | modified | modified | modified | Increase |
| sequence ID | sequence ID | sequence | sequence | (%) |
| 1836 | C1836-DV26P | 63.8 | 59.8 | 4.0 |
| | C1836-DV27P | 58.9 | | −0.9 |
| | C1836-DV28P | 63.8 | | 4.0 |
| | C1836-DV29P | 56.9 | | −2.9 |
| | C1836-DV32P | 49.2 | | −10.6 |
| | C1836-DV34P | 63.0 | | 3.2 |

I. Modification with Templates DV26-29P of the Present Disclosure

[0507] When modified with templates DV26P-29P designed in the present disclosure, unmodified sequence 1836 exhibited inhibition rates exceeding 55% on AGT gene expression, indicating an improvement as compared to 2′-O-methyl and 2′-fluoro alternating modifications. For example, after modification with templates DV26P and DV28P, the inhibition rates of C1836-DV26P and C1836-DV28P increased by 4.0%.

### II. Other Modification Templates of the Present Disclosure

[0508] When unmodified sequence 1836 was modified with templates DV32P and DV34P, the resulting sequences C1836-DV32P and C1836-DV34P exhibited inhibition rates of 49.2% and 63.0% on AGT gene expression, respectively, which were 2.9% and 10.6% lower than those of the corresponding alternately modified sequences, respectively.

[0509] After modification with templates DV26P and DV28P of the present disclosure, the inhibition rates of C1836-DV26P and C1836-DV28P increased by 14.6% and 0.8% compared to C1836-DV32P and C1836-DV34P, respectively.

Thus, it can be Concluded that:
[0510] 1) When modified with templates DV26-29P of the present disclosure, unmodified sequence 1836 exhibited significantly enhanced inhibitory effect on AGT gene expression compared to the alternately modified sequence. For example, when unmodified sequence 1836 was modified with DV26P and DV28P, the inhibition rate increased by 4.0% compared to the alternately modified sequence.
[0511] 2) The same siRNA sequence exhibited significant differences in activity when modified with different modification templates. For example, unmodified sequence 1836 modified with templates DV26P and DV28P of the present disclosure exhibited a 14.6% increase in inhibition rate compared to the sequence modified with template DV32P of the present disclosure, indicating a significant improvement.
[0512] 3) The activity of siRNA sequences modified with different templates varied greatly, with differences of up to 14.6%. Thus, it is uncertain which modification template would confer high activity to an siRNA sequence.

### (13) Unmodified Sequence 1839

TABLE 25
Inhibition rates of unmodified sequence 1839 on
AGT gene expression after template modification

| | | | Inhibition | |
|---|---|---|---|---|
| | | Inhibition | of rate (%) | |
| | | rate (%) of | corresponding | |
| | Template- | template- | alternately | |
| Unmodified | modified | modified | modified | Increase |
| sequence ID | sequence ID | sequence | sequence | (%) |
| 1839 | C1839-DV26P | 48.6 | 59.1 | −10.5 |
| | C1839-DV27P | 63.9 | | 4.8 |
| | C1839-DV28P | 51.4 | | −7.7 |
| | C1839-DV29P | 64.2 | | 5.1 |
| | C1839-DV32P | 63.7 | | 4.6 |
| | C1839-DV34P | 55.9 | | −3.2 |

I. Modification with Templates DV26-29P of the Present Disclosure

[0513] When modified with templates DV26-29P designed in the present disclosure, unmodified sequence 1839 exhibited inhibition rates exceeding 50% on AGT gene expression, indicating an improvement as compared to 2′-O-methyl and 2′-fluoro alternating modifications. For example, after modification with template DV29P, the inhibition rate of C1839-DV29P increased by 5.1%.

### II. Other Modification Templates of the Present Disclosure

[0514] When unmodified sequence 1839 was modified with templates DV32P and DV34P, the resulting sequences C1839-DV32P and C1839-DV34P exhibited inhibition rates of 63.7% and 55.9% on AGT gene expression, respectively, which were 4.6% and −3.2% higher than those of the corresponding alternately modified sequences, respectively.

[0515] After modification with template DV29P of the present disclosure, the inhibition rate of C1839-DV29P increased by 0.5% and 8.3% compared to C1839-DV32P and C1839-DV34P, respectively.

Thus, it can be Concluded that:
[0516] 1) When modified with templates DV26-29P of the present disclosure, unmodified sequence 1839 exhibited significantly enhanced inhibitory effect on AGT gene expression compared to the alternately modified sequence. For example, when unmodified sequence 1839 was modified with DV29P, the inhibition rate increased by 5.1% compared to the alternately modified sequence.
[0517] 2) The same siRNA sequence exhibited significant differences in activity when modified with different modification templates. For example, unmodified sequence 1839 modified with template DV29P of the present disclosure exhibited a 15.6% increase in inhibition rate compared to the sequence modified with template DV26P of the present disclosure, indicating a significant improvement.
[0518] 3) The activity of siRNA sequences modified with different templates varied greatly, with differences of up to 15.6%. Thus, it is uncertain which modification template would confer high activity to an siRNA sequence.

### SUMMARY

[0519] (1) The screened unmodified sequences 1576s, 1578s, 1838, 1835, 1816, 1812, 1579, 1836, 1789, 1839, 1791, 1795, and 1585s, when modified with templates DV25P-29P designed in the present disclosure, exhibited significant inhibitory effects on AGT gene expression, with inhibition rates of 40% or more. Specifically, C1812-DV25P, C1579-DV33P, and C1789-DV26P achieved inhibition rates of 74.4%, 74.0%, and 73.6%, respectively.
[0520] (2) The 12 sequences modified with templates DV25P-29P of the present disclosure showed a significant improvement in inhibition rate on AGT gene expression as compared to the alternately modified sequences. For example, the inhibition rate of unmodified sequence 1812 modified with template DV25P (C1579-DV33P) was 11.5% higher than that of the alternately modified sequence, while the inhibition rate of unmodified sequence 1791 modified with template DV26P (C1791-DV26P) was 8.5% higher than that of the alternately modified sequence.
[0521] (3) The same sequences modified with templates DV25-29P of the present disclosure exhibited significantly higher inhibition rates on AGT gene expression compared to modification with the templates disclosed in the prior art. For example, unmodified sequence 1579 modified with template DV25P of the present disclosure exhibited a 16.6% increase in inhibition rate compared to the sequence modified with the previously published Advanced ESC template DV22.
[0522] (4) The same sequences modified with templates DV25-29P of the present disclosure exhibited significantly higher inhibition rates on AGT gene expression compared to modification with templates DV32-34P of the present disclosure. For example, unmodified sequence 1812 modified with template DV25P of the present disclosure exhibited a 20.2% increase in inhibition rate compared to the sequence modified with template DV33P of the present disclosure.
[0523] (5) The activity of sequences modified with different templates varied greatly. For example, when unmodified sequence 1816 was modified with DV29P, the inhibition rate increased by 30.0% compared to modification with DV34; when unmodified sequence 1579 was modified with DV33P, the inhibition rate increased by 29.8% compared to modification with DV28P. Thus, it is uncertain which modification template would confer high activity to an siRNA sequence.

### (ii) IC₅₀ Assay

[0524] A total of 24 template-modified sequences, including C1816-DV29P, C1816-DV25P, C1812-DV25P, C1579-DV32P, C1789-DV26P, C1789-DV25P, C1839-DV29P, C1795-DV27P, C1585s-DV27P, C1835-DV26P, C1835-DV25P, C1579-DV25P, C1836-DV26P, C1791-DV26P, C1585s-DV29P, C1604-DV29P, C1606-DV29P, C1607-DV29P, C1835-DV29P, C838-DV29P, C1579-DV29P, C1576s-DV29P, C1578s-DV29P, and C1579s-DV29P, were selected for IC₅₀ assays, and the IC₅₀ values of these sequences were determined. The experimental results are shown in Table 26.

TABLE 26
IC₅₀ values of modified sequences

| Sequence ID | Sequence IC₅₀ (pM) |
|---|---|
| C1816-DV29P | 27.925 |
| C1816-DV25P | 3.530 |
| C1812-DV25P | 2.160 |
| C1579-DV32P | 4.712 |
| C1789-DV26P | 2.643 |
| C1789-DV25P | 1.884 |
| C1839-DV29P | 3.301 |
| C1795-DV27P | 3.570 |
| C1585s-DV27P | 2.863 |
| C1835-DV26P | 14.565 |
| C1835-DV25P | 14.683 |
| C1579-DV25P | 10.532 |
| C1836-DV26P | 12.838 |
| C1791-DV26P | 7.812 |
| C1585s-DV29P | 13.333 |
| C1604-DV29P | 23.160 |
| C1606-DV29P | 46.237 |
| C1607-DV29P | 61.498 |
| C1835-DV29P | 53.143 |
| C1838-DV29P | 15.393 |
| C1579-DV29P | 15.837 |
| C1576s-DV29P | 11.214 |
| C1578s-DV29P | 8.568 |
| C1579s-DV29P | 30.601 |

[0525] As shown in Table 26, the IC₅₀ values of these 24 sequences ranged from 1.884 pM to 61.498 pM. Specifically, the IC₅₀ values of C1789-DV25P, C1812-DV25P, and C1789-DV26P were 1.884 pM, 2.160 pM, and 2.643 pM, respectively. The results demonstrated that these sequences effectively inhibited AGT gene expression at low concentrations

### Example 5: Comparison of Inhibitory Effect of Sequences Disclosed in the Prior Art on AGT Gene Expression

[0526] In this example, unmodified sequences 1579, 1789, 1812, 1576s, 1578s, 1585s, 1816, 1835, 1836, 1838, 1839, and 1791 of the present disclosure were compared with structurally similar unmodified sequences disclosed in the prior art in terms of their inhibition efficiency on AGT gene expression, when modified using alternating modifications of the present disclosure and modified with templates DV25P-29P.

### 1. Experimental Materials

### Test Samples:

[0527] (1) The sequences disclosed in the prior art, as shown in Table 27.

TABLE 27
Sequences disclosed in the prior art

| | | SEQ | | SEQ | |
|---|---|---|---|---|---|
| Sequence | | ID | | ID | |
| ID | Sense strand | NO. | Antisense strand | NO. | Source |
| 579P | ACCUUUUCUUCUAAUGA | 500 | AGACUCAUUAGAAGAA | 513 | CN117751189A |
| | GUCU | | AAGGUGG | | |
| 789P | UUUGUGAAACAAAAAAG | 501 | UCACUUUUUUGUUUCAC | 514 | WO2024031101A1 |
| | UGA | | AAACA | | |
| 812P | UUGUUCUCAACUUGAAA | 502 | CCUUUUCAAGUUGAGA | 515 | WO2024031101A1 |
| | AGGGA | | ACAA | | |
| 576P | CCACCUUUUCUUCUAAU | 503 | ACUCAUUAGAAGAAAA | 516 | CN112313335A |
| | GAGU | | GGUGGGA | | |
| 578P | CACCUUUUCUUCUAAUG | 504 | UACUCAUUAGAAGAAA | 517 | CN112313335A |
| | AGUA | | AGGUGGG | | |
| 585P | UUCUAAUGAGUCGACUU | 505 | UAAAGUCGACUCAUUA | 518 | CN112852809A |
| | UA | | GAA | | |
| AD- | AGAACAAAAAUUGGGUU | 506 | UUAAAACCCAAUUUUU | 519 | CN112852809A |
| 60771 | UUAA | | GUUCUCA | | |
| AD- | GUCAUCCACAAUGAGAG | 507 | UGUACUCUCAUUGUGG | 520 | CN112852809A |
| 85481 | UACA | | AUGACGA | | |
| 816P | UCAAGUUGAGAACAAAA | 508 | UAUUUUUGUUCUCAAC | 521 | WO2024031101A1 |
| | AUA | | UUGAAA | | |
| 835P | GGGUUUUAAAAUUAAAG | 509 | UACUUUAAUUUUAAAA | 522 | CN113862268A |
| | UAUA | | CCCAA | | |
| 836P | GGUUUUAAAAUUAAAGU | 510 | AUACUUUAAUUUUAAA | 523 | CN113862268A |
| | AUAC | | ACCCA | | |
| 839P | GUUUUAAAAUUAAAGUA | 511 | UAUACUUUAAUUUUAA | 524 | CN113862268A |
| | UACA | | AACCC | | |
| 791P | UUGUGAAACAAAAAAGU | 512 | ACACUUUUUUGUUUCAC | 525 | CN106574268B |
| | GUUU | | AAUU | | |

[0528] (2) The siRNA sequences alternately modified with 2′-OMe and 2′-F along with terminal phosphorothioate modification in Example 2.
[0529] (3) The siRNA sequences modified with modification templates DV25-29P, with specific sequences listed in Table 28.

TABLE 28
Sequences modified with templates DV25P-29P

| | | | Modified | | Modified |
|---|---|---|---|---|---|
| | | | sequence SEQ | | sequence |
| | | | ID NO./ | | SEQ ID NO./ |
| | Template- | | corresponding | | corresponding |
| Unmodified | modified | | unmodified | | unmodified |
| sequence | sequence | Sense strand | sequence SEQ | Antisense strand | sequence |
| ID | ID | sequence 5′-3′ | ID NO. | sequence 5′-3′ | SEQ ID NO. |
| 1579 | C1579- | Cms-Cms-Um-Um-Um- | 407/4 | UmsEVP-Cfs-Gm-Am- | 457/17 |
| | DV25P | Um-Cf-Um-Uf-Cf-Uf- | | Cm-Uf-Cm-Am-Um- | |
| | | Am-Am-Um-Gm-Am- | | Um-Am-Gm-Am-Af- | |
| | | Gf-Um-Cm-Gm-Am | | Gm-Af-Am-Am-Am- | |
| | | | | Gm-Gms-Ums-Gm | |
| 1579 | C1579- | Cms-Cms-Um-Um-Um- | 407/4 | UmsEVP-Cfs-Gf-Af- | 454/17 |
| | DV26P | Um-Cf-Um-Uf-Cf-Uf- | | Cm-Uf-Cm-Am-Um- | |
| | | Am-Am-Um-Gm-Am- | | Um-Am-Gm-Am-Af- | |
| | | Gf-Um-Cm-Gm-Am | | Gm-Af-Am-Am-Am- | |
| | | | | Gm-Gms-Ums-Gm | |
| 1579 | C1579- | Cms-Cms-Um-Um-Um- | 407/4 | UmsEVP-Cfs-Gm-Af- | 453/17 |
| | DV27P | Um-Cf-Um-Uf-Cf-Uf- | | Cf-Uf-Cm-Am-Um-Um- | |
| | | Am-Am-Um-Gm-Am- | | Am-Gm-Am-Af-Gm-Af- | |
| | | Gf-Um-Cm-Gm-Am | | Am-Am-Am-Gm-Gms- | |
| | | | | Ums-Gm | |
| 1579 | C1579- | Cms-Cms-Um-Um-Um- | 406/4 | UmsEVP-Cfs-Gf-Af- | 454/17 |
| | DV28P | Um-Cf-Um-Uf-Cm-Uf- | | Cm-Uf-Cm-Am-Um- | |
| | | Am-Am-Um-Gm-Am- | | Um-Am-Gm-Am-Af- | |
| | | Gf-Um-Cm-Gm-Am | | Gm-Af-Am-Am-Am- | |
| | | | | Gm-Gms-Ums-Gm | |
| 1579 | C1579- | Cms-Cms-Um-Um-Um- | 406/4 | UmsEVP-Cfs-Gm-Af- | 453/17 |
| | DV29P | Um-Cf-Um-Uf-Cm-Uf- | | Cf-Uf-Cm-Am-Um-Um- | |
| | | Am-Am-Um-Gm-Am- | | Am-Gm-Am-Af-Gm-Af- | |
| | | Gf-Um-Cm-Gm-Am | | Am-Am-Am-Gm-Gms- | |
| | | | | Ums-Gm | |
| 1789 | C1789- | Gms-Ums-Um-Um-Gm- | 412/6 | AmsEVP-Cfs-Am-Cm- | 468/19 |
| | DV25P | Um-Gf-Am-Af-Af-Cf- | | Um-Uf-Um-Um-Um- | |
| | | Am-Am-Am-Am-Am- | | Um-Gm-Um-Um-Uf- | |
| | | Af-Gm-Um-Gm-Um | | Cm-Af-Cm-Am-Am- | |
| | | | | Am-Cms-Ams-Am | |
| 1789 | C1789- | Gms-Ums-Um-Um-Gm- | 412/5 | AmsEVP-Cfs-Af-Cf- | 465/18 |
| | DV26P | Um-Gf-Am-Af-Af-Cf- | | Um-Uf-Um-Um-Um- | |
| | | Am-Am-Am-Am-Am- | | Um-Gm-Um-Um-Uf- | |
| | | Af-Gm-Um-Gm-Um | | Cm-Af-Cm-Am-Am- | |
| | | | | Am-Cms-Ams-Am | |
| 1789 | C1789- | Gms-Ums-Um-Um-Gm- | 412/5 | AmsEVP-Cfs-Am-Cf- | 464/18 |
| | DV27P | Um-Gf-Am-Af-Af-Cf- | | Uf-Uf-Um-Um-Um-Um- | |
| | | Am-Am-Am-Am-Am- | | Gm-Um-Um-Uf-Cm-Af- | |
| | | Af-Gm-Um-Gm-Um | | Cm-Am-Am-Am-Cms- | |
| | | | | Ams-Am | |
| 1789 | C1789- | Gms-Ums-Um-Um-Gm- | 411/6 | AmsEVP-Cfs-Af-Cf- | 465/19 |
| | DV28P | Um-Gf-Am-Af-Am-Cf- | | Um-Uf-Um-Um-Um- | |
| | | Am-Am-Am-Am-Am- | | Um-Gm-Um-Um-Uf- | |
| | | Af-Gm-Um-Gm-Um | | Cm-Af-Cm-Am-Am- | |
| | | | | Am-Cms-Ams-Am | |
| 1789 | C1789- | Gms-Ums-Um-Um-Gm- | 411/5 | AmsEVP-Cfs-Am-Cf- | 464/18 |
| | DV29P | Um-Gf-Am-Af-Am-Cf- | | Uf-Uf-Um-Um-Um-Um- | |
| | | Am-Am-Am-Am-Am- | | Gm-Um-Um-Uf-Cm-Af- | |
| | | Af-Gm-Um-Gm-Um | | Cm-Am-Am-Am-Cms- | |
| | | | | Ams-Am | |
| 1812 | C1812- | Cms-Cms-Um-Um-Um- | 404/3 | UmsEVP-Ufs-Um-Gm- | 450/16 |
| | DV25P | Um-Cf-Am-Af-Gf-Uf- | | Um-Uf-Cm-Um-Cm- | |
| | | Um-Gm-Am-Gm-Am- | | Am-Am-Cm-Um-Uf- | |
| | | Af-Cm-Am-Am-Am | | Gm-Af-Am-Am-Am- | |
| | | | | Gm-Gms-Gms-Am | |
| 1812 | C1812- | Cms-Cms-Um-Um-Um- | 404/3 | UmsEVP-Ufs-Uf-Gf- | 447/16 |
| | DV26P | Um-Cf-Am-Af-Gf-Uf- | | Um-Uf-Cm-Um-Cm- | |
| | | Um-Gm-Am-Gm-Am- | | Am-Am-Cm-Um-Uf- | |
| | | Af-Cm-Am-Am-Am | | Gm-Af-Am-Am-Am- | |
| | | | | Gm-Gms-Gms-Am | |
| 1812 | C1812- | Cms-Cms-Um-Um-Um- | 404/3 | UmsEVP-Ufs-Um-Gf- | 446/16 |
| | DV27P | Um-Cf-Am-Af-Gf-Uf- | | Uf-Uf-Cm-Um-Cm-Am- | |
| | | Um-Gm-Am-Gm-Am- | | Am-Cm-Um-Uf-Gm-Af- | |
| | | Af-Cm-Am-Am-Am | | Am-Am-Am-Gm-Gms- | |
| | | | | Gms-Am | |
| 1812 | C1812- | Cms-Cms-Um-Um-Um- | 403/3 | UmsEVP-Ufs-Uf-Gf- | 447/16 |
| | DV28P | Um-Cf-Am-Af-Gm-Uf- | | Um-Uf-Cm-Um-Cm- | |
| | | Um-Gm-Am-Gm-Am- | | Am-Am-Cm-Um-Uf- | |
| | | Af-Cm-Am-Am-Am | | Gm-Af-Am-Am-Am- | |
| | | | | Gm-Gms-Gms-Am | |
| 1812 | C1812- | Cms-Cms-Um-Um-Um- | 403/3 | UmsEVP-Ufs-Um-Gf- | 446/16 |
| | DV29P | Um-Cf-Am-Af-Gm-Uf- | | Uf-Uf-Cm-Um-Cm-Am- | |
| | | Um-Gm-Am-Gm-Am- | | Am-Cm-Um-Uf-Gm-Af- | |
| | | Af-Cm-Am-Am-Am | | Am-Am-Am-Gm-Gms- | |
| | | | | Gms-Am | |
| 1576s | C1576s- | Cms-Cms-Am-Cm-Cm- | 423/11 | UmsEVP-Ufs-Cm-Af- | 488/24 |
| | DV29P | Uf-Um-Uf-Um-Cf-Um- | | Uf-Uf-Am-Gm-Am-Am- | |
| | | Um-Cm-Um-Am-Af- | | Gm-Am-Am-Af-Am-Gf- | |
| | | Um-Gm-Am-Am | | Gm-Um-Gm-Gms-Gms- | |
| | | | | Am | |
| 1576s | C1576s- | Cms-Cms-Am-Cm-Cm- | 423/11 | UmsEVP-Ufs-Cf-Af- | 489/24 |
| | DV28P | Uf-Um-Uf-Um-Cf-Um- | | Um-Uf-Am-Gm-Am- | |
| | | Um-Cm-Um-Am-Af- | | Am-Gm-Am-Am-Af- | |
| | | Um-Gm-Am-Am | | Am-Gf-Gm-Um-Gm- | |
| | | | | Gms-Gms-Am | |
| 1576s | C1576s- | Cms-Cms-Am-Cm-Cm- | 424/11 | UmsEVP-Ufs-Cf-Af- | 489/24 |
| | DV26P | Uf-Um-Uf-Uf-Cf-Um- | | Um-Uf-Am-Gm-Am- | |
| | | Um-Cm-Um-Am-Af- | | Am-Gm-Am-Am-Af- | |
| | | Um-Gm-Am-Am | | Am-Gf-Gm-Um-Gm- | |
| | | | | Gms-Gms-Am | |
| 1578s | C1578s- | Ams-Cms-Cm-Um-Um- | 426/12 | UmsEVP-Afs-Cm-Uf- | 492/25 |
| | DV29P | Uf-Um-Cf-Um-Uf-Cm- | | Cf-Af-Um-Um-Am-Gm- | |
| | | Um-Am-Am-Um-Gf- | | Am-Am-Gm-Af-Am-Af- | |
| | | Am-Gm-Um-Am | | Am-Gm-Gm-Ums-Gms- | |
| | | | | Gm | |
| 1578s | C1578s- | Ams-Cms-Cm-Um-Um- | 426/12 | UmsEVP-Afs-Cf-Uf- | 493/25 |
| | DV28P | Uf-Um-Cf-Um-Uf-Cm- | | Cm-Af-Um-Um-Am- | |
| | | Um-Am-Am-Um-Gf- | | Gm-Am-Am-Gm-Af- | |
| | | Am-Gm-Um-Am | | Am-Af-Am-Gm-Gm- | |
| | | | | Ums-Gms-Gm | |
| 1578s | C1578s- | Ams-Cms-Cm-Um-Um- | 427/12 | UmsEVP-Afs-Cf-Uf- | 493/25 |
| | DV26P | Uf-Um-Cf-Uf-Uf-Cm- | | Cm-Af-Um-Um-Am- | |
| | | Um-Am-Am-Um-Gf- | | Gm-Am-Am-Gm-Af- | |
| | | Am-Gm-Um-Am | | Am-Af-Am-Gm-Gm- | |
| | | | | Ums-Gms-Gm | |
| 1585s | C1585s- | Cms-Ums-Um-Cm-Um- | 421/10 | UmsEVP-Afs-Af-Af- | 484/23 |
| | DV26P | Af-Am-Uf-Gf-Af-Gm- | | Gm-Uf-Cm-Gm-Am- | |
| | | Um-Cm-Gm-Am-Cf- | | Cm-Um-Cm-Am-Uf- | |
| | | Um-Um-Um-Am | | Um-Af-Gm-Am-Am- | |
| | | | | Gms-Ams-Am | |
| 1585s | C1585s- | Cms-Ums-Um-Cm-Um- | 421/10 | UmsEVP-Afs-Am-Af- | 483/23 |
| | DV27P | Af-Am-Uf-Gf-Af-Gm- | | Gf-Uf-Cm-Gm-Am-Cm- | |
| | | Um-Cm-Gm-Am-Cf- | | Um-Cm-Am-Uf-Um-Af- | |
| | | Um-Um-Um-Am | | Gm-Am-Am-Gms-Ams- | |
| | | | | Am | |
| 1585s | C1585s- | Cms-Ums-Um-Cm-Um- | 420/10 | UmsEVP-Afs-Af-Af- | 484/23 |
| | DV28P | Af-Am-Uf-Gm-Af-Gm- | | Gm-Uf-Cm-Gm-Am- | |
| | | Um-Cm-Gm-Am-Cf- | | Cm-Um-Cm-Am-Uf- | |
| | | Um-Um-Um-Am | | Um-Af-Gm-Am-Am- | |
| | | | | Gms-Ams-Am | |
| 1585s | C1585s- | Cms-Ums-Um-Cm-Um- | 420/10 | UmsEVP-Afs-Am-Af- | 483/23 |
| | DV29P | Af-Am-Uf-Gm-Af-Gm- | | Gf-Uf-Cm-Gm-Am-Cm- | |
| | | Um-Cm-Gm-Am-Cf- | | Um-Cm-Am-Uf-Um-Af- | |
| | | Um-Um-Um-Am | | Gm-Am-Am-Gms-Ams- | |
| | | | | Am | |
| 1789 | C1789- | Gms-Ums-Um-Um-Gm- | 412/5 | AmsEVP-Cfs-Af-Cf- | 465/18 |
| | DV26P | Um-Gf-Am-Af-Af-Cf- | | Um-Uf-Um-Um-Um- | |
| | | Am-Am-Am-Am-Am- | | Um-Gm-Um-Um-Uf- | |
| | | Af-Gm-Um-Gm-Um | | Cm-Af-Cm-Am-Am- | |
| | | | | Am-Cms-Ams-Am | |
| 1789 | C1789- | \|Gms-Ums-Um-Um-Gm- | 412/5 | AmsEVP-Cfs-Am-Cf- | 464/18 |
| | DV27P | Um-Gf-Am-Af-Af-Cf- | | Uf-Uf-Um-Um-Um-Um- | |
| | | Am-Am-Am-Am-Am- | | Gm-Um-Um-Uf-Cm-Af- | |
| | | Af-Gm-Um-Gm-Um | | Cm-Am-Am-Am-Cms- | |
| | | | | Ams-Am | |
| 1816 | C1816- | Ums-Ums-Cm-Am-Am- | 401/2 | AmsEVP-Afs-Um-Um- | 443/15 |
| | DV25P | Gm-Uf-Um-Gf-Af-Gf- | | Um-Uf-Um-Gm-Um- | |
| | | Am-Am-Cm-Am-Am- | | Um-Cm-Um-Cm-Af- | |
| | | Af-Am-Am-Um-Um | | Am-Cf-Um-Um-Gm- | |
| | | | | Am-Ams-Ams-Am | |
| 1816 | C1816- | Ums-Ums-Cm-Am-Am- | 401/2 | AmsEVP-Afs-Uf-Uf- | 440/15 |
| | DV26P | Gm-Uf-Um-Gf-Af-Gf- | | Um-Uf-Um-Gm-Um- | |
| | | Am-Am-Cm-Am-Am- | | Um-Cm-Um-Cm-Af- | |
| | | Af-Am-Am-Um-Um | | Am-Cf-Um-Um-Gm- | |
| | | | | Am-Ams-Ams-Am | |
| 1816 | C1816- | Ums-Ums-Cm-Am-Am- | 401/2 | AmsEVP-Afs-Um-Uf- | 439/15 |
| | DV27P | Gm-Uf-Um-Gf-Af-Gf- | | Uf-Uf-Um-Gm-Um-Um- | |
| | | Am-Am-Cm-Am-Am- | | Cm-Um-Cm-Af-Am-Cf- | |
| | | Af-Am-Am-Um-Um | | Um-Um-Gm-Am-Ams- | |
| | | | | Ams-Am | |
| 1816 | C1816- | Ums-Ums-Cm-Am-Am- | 400/2 | AmsEVP-Afs-Uf-Uf- | 440/15 |
| | DV28P | Gm-Uf-Um-Gf-Am-Gf- | | Um-Uf-Um-Gm-Um- | |
| | | Am-Am-Cm-Am-Am- | | Um-Cm-Um-Cm-Af- | |
| | | Af-Am-Am-Um-Um | | Am-Cf-Um-Um-Gm- | |
| | | | | Am-Ams-Ams-Am | |
| 1816 | C1816- | Ums-Ums-Cm-Am-Am- | 400/2 | AmsEVP-Afs-Um-Uf- | 439/15 |
| | DV29P | Gm-Uf-Um-Gf-Am-Gf- | | Uf-Uf-Um-Gm-Um-Um- | |
| | | Am-Am-Cm-Am-Am- | | Cm-Um-Cm-Af-Am-Cf- | |
| | | Af-Am-Am-Um-Um | | Um-Um-Gm-Am-Ams- | |
| | | | | Ams-Am | |
| 1835 | C1835- | Ums-Ums-Gm-Gm-Gm- | 398/1 | UmsEVP-Afs-Cm-Um- | 436/14 |
| | DV25P | Um-Uf-Um-Uf-Af-Af- | | Um-Uf-Am-Am-Um- | |
| | | Am-Am-Um-Um-Am- | | Um-Um-Um-Am-Af- | |
| | | Af-Am-Gm-Um-Am | | Am-Af-Cm-Cm-Cm- | |
| | | | | Am-Ams-Ums-Um | |
| 1835 | C1835- | Ums-Ums-Gm-Gm-Gm- | 398/1 | UmsEVP-Afs-Cf-Uf- | 433/14 |
| | DV26P | Um-Uf-Um-Uf-Af-Af- | | Um-Uf-Am-Am-Um- | |
| | | Am-Am-Um-Um-Am- | | Um-Um-Um-Am-Af- | |
| | | Af-Am-Gm-Um-Am | | Am-Af-Cm-Cm-Cm- | |
| | | | | Am-Ams-Ums-Um | |
| 1835 | C1835- | Ums-Ums-Gm-Gm-Gm- | 398/1 | UmsEVP-Afs-Cm-Uf- | 432/14 |
| | DV27P | Um-Uf-Um-Uf-Af-Af- | | Uf-Uf-Am-Am-Um-Um- | |
| | | Am-Am-Um-Um-Am- | | Um-Um-Am-Af-Am-Af- | |
| | | Af-Am-Gm-Um-Am | | Cm-Cm-Cm-Am-Ams- | |
| | | | | Ums-Um | |
| 1835 | C1835- | Ums-Ums-Gm-Gm-Gm- | 397/1 | UmsEVP-Afs-Cf-Uf- | 433/14 |
| | DV28P | Um-Uf-Um-Uf-Am-Af- | | Um-Uf-Am-Am-Um- | |
| | | Am-Am-Um-Um-Am- | | Um-Um-Um-Am-Af- | |
| | | Af-Am-Gm-Um-Am | | Am-Af-Cm-Cm-Cm- | |
| | | | | Am-Ams-Ums-Um | |
| 1835 | C1835- | Ums-Ums-Gm-Gm-Gm- | 397/1 | UmsEVP-Afs-Cm-Uf- | 432/14 |
| | DV29P | \|Um-Uf-Um-Uf-Am-Af- | | Uf-Uf-Am-Am-Um-Um- | |
| | | Am-Am-Um-Um-Am- | | Um-Um-Am-Af-Am-Af- | |
| | | Af-Am-Gm-Um-Am | | Cm-Cm-Cm-Am-Ams- | |
| | | | | Ums-Um | |
| 1838 | C1838- | Gms-Gms-Um-Um-Um- | 429/13 | UmsEVP-Ufs-Am-Uf- | 496/26 |
| | DV29P | Um-Af-Am-Af-Am-Uf- | | Af-Cf-Um-Um-Um-Am- | |
| | | Um-Am-Am-Am-Gm- | | Am-Um-Um-Uf-Um-Af- | |
| | | Uf-Am-Um-Am-Am | | Am-Am-Am-Cm-Cms- | |
| | | | | Cms-Am | |
| 1838 | C1838- | Gms-Gms-Um-Um-Um- | 429/13 | UmsEVP-Ufs-Af-Uf- | 497/26 |
| | DV28P | Um-Af-Am-Af-Am-Uf- | | Am-Cf-Um-Um-Um- | |
| | | Um-Am-Am-Am-Gm- | | Am-Am-Um-Um-Uf- | |
| | | Uf-Am-Um-Am-Am | | Um-Af-Am-Am-Am- | |
| | | | | Cm-Cms-Cms-Am | |
| 1838 | C1838- | Gms-Gms-Um-Um-Um- | 430/13 | UmsEVP-Ufs-Af-Uf- | 497/26 |
| | DV26P | Um-Af-Am-Af-Af-Uf- | | Am-Cf-Um-Um-Um- | |
| | | Um-Am-Am-Am-Gm- | | Am-Am-Um-Um-Uf- | |
| | | Uf-Am-Um-Am-Am | | Um-Af-Am-Am-Am- | |
| | | | | Cm-Cms-Cms-Am | |
| 1836 | C1836- | Ums-Gms-Gm-Gm-Um- | 410/5 | AmsEVP-Ufs-Af-Cf- | 461/18 |
| | DV26P | Um-Uf-Um-Af-Af-Af- | | Um-Uf-Um-Am-Am- | |
| | | Am-Um-Um-Am-Am- | | Um-Um-Um-Um-Af- | |
| | | Af-Gm-Um-Am-Um | | Am-Af-Am-Cm-Cm- | |
| | | | | Cm-Ams-Ams-Um | |
| 1836 | C1836- | Ums-Gms-Gm-Gm-Um- | 410/5 | AmsEVP-Ufs-Am-Cf- | 460/18 |
| | DV27P | Um-Uf-Um-Af-Af-Af- | | Uf-Uf-Um-Am-Am-Um- | |
| | | Am-Um-Um-Am-Am- | | Um-Um-Um-Af-Am-Af- | |
| | | Af-Gm-Um-Am-Um | | Am-Cm-Cm-Cm-Ams- | |
| | | | | Ams-Um | |
| 1836 | C1836- | Ums-Gms-Gm-Gm-Um- | 409/5 | AmsEVP-Ufs-Af-Cf- | 461/18 |
| | DV28P | Um-Uf-Um-Af-Am-Af- | | Um-Uf-Um-Am-Am- | |
| | | Am-Um-Um-Am-Am- | | Um-Um-Um-Um-Af- | |
| | | Af-Gm-Um-Am-Um | | Am-Af-Am-Cm-Cm- | |
| | | | | Cm-Ams-Ams-Um | |
| 1836 | C1836- | Ums-Gms-Gm-Gm-Um- | 409/5 | AmsEVP-Ufs-Am-Cf- | 460/18 |
| | DV29P | Um-Uf-Um-Af-Am-Af- | | Uf-Uf-Um-Am-Am-Um- | |
| | | Am-Um-Um-Am-Am- | | Um-Um-Um-Af-Am-Af- | |
| | | Af-Gm-Um-Am-Um | | Am-Cm-Cm-Cm-Ams- | |
| | | | | Ams-Um | |
| 1839 | C1839- | Gms-Ums-Um-Um-Um- | 415/7 | UmsEVP-Gfs-Uf-Af- | 472/20 |
| | DV26P | Am-Af-Am-Af-Uf-Uf- | | Um-Af-Cm-Um-Um- | |
| | | Am-Am-Am-Gm-Um- | | Um-Am-Am-Um-Uf- | |
| | | Af-Um-Am-Cm-Am | | Um-Uf-Am-Am-Am- | |
| | | | | Am-Cms-Cms-Cm | |
| 1839 | C1839- | Gms-Ums-Um-Um-Um- | 415/7 | UmsEVP-Gfs-Um-Af- | 471/20 |
| | DV27P | Am-Af-Am-Af-Uf-Uf- | | Uf-Af-Cm-Um-Um-Um- | |
| | | Am-Am-Am-Gm-Um- | | Am-Am-Um-Uf-Um-Uf- | |
| | | Af-Um-Am-Cm-Am | | Am-Am-Am-Am-Cms- | |
| | | | | Cms-Cm | |
| 1839 | C1839- | Gms-Ums-Um-Um-Um- | 414/7 | UmsEVP-Gfs-Uf-Af- | 472/20 |
| | DV28P | Am-Af-Am-Af-Um-Uf- | | Um-Af-Cm-Um-Um- | |
| | | Am-Am-Am-Gm-Um- | | Um-Am-Am-Um-Uf- | |
| | | Af-Um-Am-Cm-Am | | Um-Uf-Am-Am-Am- | |
| | | | | Am-Cms-Cms-Cm | |
| 1839 | C1839- | Gms-Ums-Um-Um-Um- | 414/7 | UmsEVP-Gfs-Um-Af- | 471/20 |
| | DV29P | Am-Af-Am-Af-Um-Uf- | | Uf-Af-Cm-Um-Um-Um- | |
| | | Am-Am-Am-Gm-Um- | | Am-Am-Um-Uf-Um-Uf- | |
| | | Af-Um-Am-Cm-Am | | Am-Am-Am-Am-Cms- | |
| | | | | Cms-Cm | |
| 1791 | C1791- | Ums-Ums-Gm-Um-Gm- | 417/8 | UmsEVP-Afs-Af-Cf- | 476/21 |
| | DV26P | Am-Af-Am-Cf-Af-Af- | | Am-Cf-Um-Um-Um- | |
| | | Am-Am-Am-Am-Gm- | | Um-Um-Um-Gm-Uf- | |
| | | Uf-Gm-Um-Um-Am | | Um-Uf-Cm-Am-Cm- | |
| | | | | Am-Ams-Ams-Cm | |
| 1791 | C1791- | Ums-Ums-Gm-Um-Gm- | 417/8 | UmsEVP-Afs-Am-Cf- | 475/21 |
| | DV27P | Am-Af-Am-Cf-Af-Af- | | Af-Cf-Um-Um-Um-Um- | |
| | | Am-Am-Am-Am-Gm- | | Um-Um-Gm-Uf-Um-Uf- | |
| | | Uf-Gm-Um-Um-Am | | Cm-Am-Cm-Am-Ams- | |
| | | | | Ams-Cm | |
| 1791 | C1791- | Ums-Ums-Gm-Um-Gm- | 416/8 | UmsEVP-Afs-Af-Cf- | 476/21 |
| | DV28P | Am-Af-Am-Cf-Am-Af- | | Am-Cf-Um-Um-Um- | |
| | | Am-Am-Am-Am-Gm- | | Um-Um-Um-Gm-Uf- | |
| | | Uf-Gm-Um-Um-Am | | Um-Uf-Cm-Am-Cm- | |
| | | | | Am-Ams-Ams-Cm | |
| 1791 | C1791- | Ums-Ums-Gm-Um-Gm- | 416/8 | UmsEVP-Afs-Am-Cf- | 475/21 |
| | DV29P | Am-Af-Am-Cf-Am-Af- | | Af-Cf-Um-Um-Um-Um- | |
| | | Am-Am-Am-Am-Gm- | | Um-Um-Gm-Uf-Um-Uf- | |
| | | Uf-Gm-Um-Um-Am | | Cm-Am-Cm-Am-Ams- | |
| | | | | Ams-Cm | |

[0530] Cell type: HepG2 cells, provided by Cyagen (H1-1701).
[0531] HepG2 cells were cultured in DMEM medium (ATCC-30-2003) containing 10% fetal bovine serum (FBS, ExCell Bio-FSP500) and 1% penicillin-streptomycin (HyClone-SV30010).
[0532] Drug vehicle: sterile nuclease-free water, Gibco Opti-MEM.

### 2. Experimental Methods

[0533] The inhibitory effects of the test samples on the mRNA expression of AGT genes in HepG2 cell lines were tested by qRT-PCR.

### 2.1 Cell Culture

[0534] HepG2 cells in the logarithmic growth phase were harvested from subcultured stocks and cultured in DMEM medium containing 10% fetal bovine serum (supplemented with 100 μL/mL of penicillin and streptomycin). The cells were incubated in a cell culture incubator at 37° C. with 5% CO₂, with medium replaced daily. For subculture, the cells were digested with 0.25% trypsin, centrifuged at 1000 rpm for 5 minutes, and the supernatant was discarded. Fresh medium was added for subculture.

### 2.2 Cell Transfection

[0535] Preparation of transfection mixture: Lipofectamine RNAiMAX and Opti-MEM were mixed at a ratio of 2:98 and vortexed thoroughly.

[0536] Preparation of transfection reagent: 60 μL of siRNA solution diluted in Opti-MEM was mixed with 60 μL of the prepared transfection mixture at a ratio of 1:1 (v/v), vortexed thoroughly, and the mixture was incubated at room temperature for 15 minutes to obtain lipid nanoparticles (LNPs). A 12.5 μL aliquot was taken for encapsulation efficiency analysis.

[0537] Blank control transfection reagent: 60 μL of the prepared transfection mixture was added to 60 μL of Opti-MEM, vortexed thoroughly, and the mixture was incubated at room temperature for 15 minutes.

[0538] The prepared transfection reagent was added to a 24-well cell culture plate (100 μL per well), resulting in a final siRNA concentration of 0.02 nM per well. 500 μL of cell suspension (1.5×10⁵ cells per mL) was added per well. After mixing by crosswise method, the plate was incubated in a cell culture incubator at 37° C. with 5% CO₂ for 40 hours.

2.3 AGT mRNA Assay

### 1) RNA Extraction

[0539] The procedure was the same as that described in “1) RNA extraction” under “2.3 AGT mRNA assay” in Example 2.

### 2) RNA Concentration Measurement

[0540] The procedure was the same as that described in “2) RNA concentration measurement” under “2.3 AGT mRNA assay” in Example 2.

3) Quantitative Analysis of AGT mRNA

[0541] In a 15 mL centrifuge tube, all components except primers and templates were added in 7.5×48=360 aliquots, labeled as A.

[0542] In a pre-labeled 1.5 mL EP tube, 77 μL of A and 420 ng of total RNA were added in 7 aliquots per tube, followed by mixing for later use.

[0543] The forward and reverse primers for both the internal reference gene GAPDH and the target gene AGT were mixed for later use.

[0544] In a PCR plate, 11 μL of B and 1 μL of C were added per well. The plate was sealed with a sealing film, centrifuged at 3000 rpm for 1 minute, and loaded for qPCR analysis.
[0545] All operations in this section were performed on ice to maintain low-temperature conditions.
   The Plate was Placed in a qPCR Instrument and Run According to the Following Program:
[0546] Reverse transcription: 55° C. for 15 minutes;
[0547] Pre-denaturation: 95° C. for 30 seconds;
[0548] Cycling reaction: 95° C. for 10 seconds; 60° C. for 35 seconds; 40 cycles;
[0549] Melting curve: 95° C. for 15 seconds; 60° C. for 60 seconds; 95° C. for 15 seconds.

[0550] The total run time was approximately 2 hours. Experimental results were analyzed, and 2^{-ΔΔCt} was calculated.

### 2.4 Data Processing

[0551] AGT mRNA expression rate (%) was calculated using the following formula:

Expression rate=(AGT mRNA expression level in experimental group/AGT mRNA expression level in blank control group)×100%;

Inhibition rate of AGT gene expression=1−expression rate (%).

### 3. Experimental Results

[0552] The specific experimental results are shown in Table 29.

[0553] The experimental results demonstrated that both the alternately modified sequences and the sequences modified with specific modification templates in the present disclosure exhibited significantly enhanced AGT inhibitory activity compared to the structurally similar unmodified sequences disclosed in the prior art. For example, compared to sequence 1812 of the present disclosure, sequence 812P disclosed in the prior art lacks one base A at the 3′ end of the sense strand and one base U at the 5′ end of the antisense strand, with all other bases being identical. However, unmodified sequence 1812 of the present disclosure exhibited a 14.3% increase in inhibition rate compared to 812P. The alternately modified sequence exhibited an inhibition rate of 62.9%, which was 20.4% higher than that of 812P. After modification with template DV25 of the present disclosure, the inhibition rate reached 74.4%, which was 31.9% higher than that of 31P.

(1) Compared to the structurally similar unmodified sequences disclosed in the prior art, the unmodified sequences, alternately modified sequences, and sequences modified with specific modification templates of the present disclosure exhibited significantly higher inhibition rates on AGT gene expression, with an increase of up to 91.0%.

[0554] Compared to the structurally similar sequences disclosed in the prior art, the unmodified sequences, alternately modified sequences, and sequences modified with specific modification templates in the present disclosure exhibited significantly higher inhibition rates on AGT gene expression. For example, unmodified sequence 812P exhibited an inhibition rate of 42.5%. The structurally similar unmodified sequence 1812 of the present disclosure exhibited an inhibition rate of 56.8%, which was 14.3% higher than that of 812P. The alternately modified sequence exhibited an inhibition rate of 62.9%, which was 20.4% higher than that of 812P. After modification with template DV25 of the present disclosure, the inhibition rate reached 74.4%, which was 31.9% higher than that of 812P.

TABLE 29
Inhibition rates of similar sequences in the prior art and the present disclosure on AGT gene expression

| | | | | | Alternately modified | | | | | |
|---|---|---|---|---|---|---|---|---|---|---|
| | | Unmodified sequences of the | | | sequences of the present | | | Template-modified sequences of the | | |
| Sequences | | present disclosure | | | disclosure | | | present disclosure | | |
| disclosed in the | | | | Increase | | | Increase | | | Increase |
| prior art | | | | compared | | | compared | | | compared |
| | Inhibition | | Inhibition | to prior | | Inhibition | to prior | | Inhibition | to prior |
| Name | rate (%) | Seq ID | rate (%) | art (%) | Seq ID | rate (%) | art (%) | Seq ID | rate (%) | art (%) |
| 579P | 47 | 1579 | 58.2 | 11.2 | B1579- | 61.1 | 14.1 | C1579-DV25P | 55.6 | 8.6 |
| | | | | | AL | | | C1579-DV26P | 72.2 | 25.2 |
| | | | | | | | | C1579-DV27P | 70.8 | 23.8 |
| | | | | | | | | C1579-DV28P | 63.3 | 16.3 |
| | | | | | | | | C1579-DV29P | 44.2 | −2.8 |
| 789P | 51.9 | 1789 | 54.5 | 2.6 | B1789- | 63.5 | 11.6 | C1789-DV25P | 69 | 17.1 |
| | | | | | AL | | | C1789-DV26P | 73.6 | 21.7 |
| | | | | | | | | C1789-DV27P | 66.3 | 14.4 |
| | | | | | | | | C1789-DV28P | 63.1 | 11.2 |
| | | | | | | | | C1789-DV29P | 64.5 | 12.6 |
| 812P | 42.5 | 1812 | 56.8 | 14.3 | B1812- | 62.9 | 20.4 | C1812-DV25P | 74.4 | 31.9 |
| | | | | | AL | | | C1812-DV26P | 58 | 15.5 |
| | | | | | | | | C1812-DV27P | 63.9 | 21.4 |
| | | | | | | | | C1812-DV28P | 55.3 | 12.8 |
| | | | | | | | | C1812-DV29P | 66.9 | 24.4 |
| 576P | 38.2 | 1576s | 59.1 | 20.9 | B1576s- | 64.6 | 26.4 | C1576s-DV26P | 73.4 | 35.2 |
| | | | | | AL | | | C1576s-DV28P | 58.8 | 20.6 |
| | | | | | | | | C1576s-DV29P | 79.3 | 41.1 |
| | | | | | | | | C1576s-DV25P | 73.3 | 35.1 |
| | | | | | | | | C1576s-DV27P | 69.7 | 31.5 |
| 578P | 33.6 | 1578s | 55.2 | 21.6 | B1578s- | 63.9 | 30.3 | C1578s-DV26P | 69.7 | 36.1 |
| | | | | | AL | | | C1578s-DV28P | 56.9 | 23.3 |
| | | | | | | | | C1578s-DV29P | 77.1 | 43.5 |
| | | | | | | | | C1578s-DV25P | 75.8 | 42.2 |
| | | | | | | | | C1578s-DV27P | 73.1 | 39.5 |
| 585P | 47.33 | 1585s | 48.9 | 1.57 | B1585s- | 59.3 | 11.97 | C1585s-DV26P | 62.6 | 15.27 |
| | | | | | AL | | | C1585s-DV27P | 64.6 | 17.27 |
| | | | | | | | | C1585s-DV28P | 49.5 | 2.17 |
| | | | | | | | | C1585s-DV29P | 59.2 | 11.87 |
| 816P | 64.5 | 1816 | 46.8 | −17.7 | B1816- | 60.9 | −3.6 | C1816-DV25P | 68.1 | 3.6 |
| | | | | | AL | | | C1816-DV26P | 58.5 | −6 |
| | | | | | | | | C1816-DV27P | 64.5 | 0 |
| | | | | | | | | C1816-DV28P | 49.2 | −15.3 |
| | | | | | | | | C1816-DV29P | 68.5 | 4 |
| 835P | 13.9 | 1835 | 51.6 | 37.7 | B1835- | 62.3 | 48.4 | C1835-DV25P | 68.2 | 54.3 |
| | | | | | AL | | | C1835-DV26P | 71.8 | 57.9 |
| | | | | | | | | C1835-DV27P | 51.2 | 37.3 |
| | | | | | | | | C1835-DV28P | 70 | 56.1 |
| | | | | | | | | C1835-DV29P | 64.9 | 51 |
| 836P | 41.9 | 1836 | 46.5 | 4.6 | B1836- | 59.8 | 17.9 | C1836-DV26P | 63.8 | 21.9 |
| | | | | | AL | | | C1836-DV27P | 58.9 | 17 |
| | | | | | | | | C1836-DV28P | 63.8 | 21.9 |
| | | | | | | | | C1836-DV29P | 56.9 | 15 |
| 839P | −15.4 | 1839 | 45.7 | 61.1 | B1839- | 59.1 | 74.5 | C1839-DV26P | 48.6 | 64 |
| | | | | | AL | | | C1839-DV27P | 63.9 | 79.3 |
| | | | | | | | | C1839-DV28P | 51.4 | 66.8 |
| | | | | | | | | C1839-DV29P | 64.2 | 79.6 |
| | | 1838 | 50.6 | 66.0 | B1838- | 63.6 | 79.0 | C1838-DV26P | 67.2 | 82.6 |
| | | | | | AL | | | C1838-DV28P | 60.3 | 75.7 |
| | | | | | | | | C1838-DV29P | 75.6 | 91 |
| | | | | | | | | C1838-DV25P | 69.3 | 84.7 |
| | | | | | | | | C1838-DV27P | 72.3 | 87.7 |
| 791P | 50.8 | 1791 | 46.5 | −4.3 | B1791- | 61.8 | 11 | C1791-DV26P | 70.3 | 19.5 |
| | | | | | AL | | | C1791-DV27P | 63.6 | 12.8 |
| | | | | | | | | C1791-DV28P | 64.6 | 13.8 |
| | | | | | | | | C1791-DV29P | 59.4 | 8.6 |

### I. Sequence Structure Comparison

[0555] As shown in Table 30, the sequences disclosed in the prior art are highly similar to the sequences of the present disclosure, with only minor differences. Detailed comparisons are provided in the table below:

TABLE 30
Comparison between sequences disclosed in the prior art and sequences of the
present disclosure

| | | SEQ | | SEQ | |
|---|---|---|---|---|---|
| Sequence | | ID | | ID | |
| ID | Sense strand 5′-3′ | NO. | Antisense strand 5′-3′ | NO. | Source |
| 579P | ACCUUUUCUUCUAAUGA | 500 | AGACUCAUUAGAAGAAAA | 513 | CN117751189A |
| | GUCU | | GGUGG | | |
| 1579 | CCUUUUCUUCUAAUGAG | 4 | UCGACUCAUUAGAAGAAA | 17 | Sequence of the |
| | UCGA | | AGGUG | | present disclosure |
| 789P | UUUGUGAAACAAAAAAG | 501 | UCACUUUUUUGUUUCACA | 514 | WO2024031101A1 |
| | UGA | | AACA | | |
| 1789 | GUUUGUGAAACAAAAAA | 6 | ACACUUUUUUGUUUCACA | 19 | Sequence of the |
| | GUGU | | AACAA | | present disclosure |
| 812P | CCUUUUCAAGUUGAGAA | 502 | UUGUUCUCAACUUGAAAA | 515 | WO2024031101A1 |
| | CAA | | GGGA | | |
| 1812 | CCUUUUCAAGUUGAGAA | 3 | UUUGUUCUCAACUUGAAA | 16 | Sequence of the |
| | CAAA | | AGGGA | | present disclosure |
| 576P | CCACCUUUUCUUCUAAU | 503 | ACUCAUUAGAAGAAAAGG | 516 | CN112313335A |
| | GAGU | | UGGGA | | |
| 1576s | CCACCUUUUCUUCUAAU | 11 | UUCAUUAGAAGAAAAGGU | 24 | Sequence of the |
| | GAA | | GGGA | | present disclosure |
| 578P | CACCUUUUCUUCUAAUG | 504 | UACUCAUUAGAAGAAAAG | 517 | CN112313335A |
| | AGUA | | GUGGG | | |
| 1578s | ACCUUUUCUUCUAAUGA | 12 | UACUCAUUAGAAGAAAAG | 25 | Sequence of the |
| | GUA | | GUGG | | present disclosure |
| 585P | UUCUAAUGAGUCGACUU | 505 | UAAAGUCGACUCAUUAGA | 518 | CN112852809A |
| | UA | | A | | |
| 1585s | CUUCUAAUGAGUCGACU | 10 | UAAAGUCGACUCAUUAGA | 23 | Sequence of the |
| | UUA | | AGAA | | present disclosure |
| 816P | UCAAGUUGAGAACAAAA | 508 | UAUUUUUGUUCUCAACUU | 521 | WO2024031101A1 |
| | AUA | | GAAA | | |
| 1816 | UUCAAGUUGAGAACAAA | 2 | AAUUUUUGUUCUCAACUU | 15 | Sequence of the |
| | AAUU | | GAAAA | | present disclosure |
| 835P | GGGUUUUAAAAUUAAAG | 509 | UACUUUAAUUUUAAAACC | 522 | CN113862268A |
| | UAUA | | CAA | | |
| 1835 | UUGGGUUUUAAAAUUAA | 1 | UACUUUAAUUUUAAAACC | 14 | Sequence of the |
| | AGUA | | CAAUU | | present disclosure |
| 836P | GGUUUUAAAAUUAAAGU | 510 | AUACUUUAAUUUUAAAAC | 523 | CN113862268A |
| | AUAC | | CCA | | |
| 1836 | UGGGUUUUAAAAUUAAA | 5 | AUACUUUAAUUUUAAAAC | 18 | Sequence of the |
| | GUAU | | CCAAU | | present disclosure |
| 839P | GUUUUAAAAUUAAAGUA | 511 | UAUACUUUAAUUUUAAAA | 524 | CN113862268A |
| | UACA | | CCC | | |
| 1839 | GUUUUAAAAUUAAAGUA | 7 | UGUAUACUUUAAUUUUAA | 20 | Sequence of the |
| | UACA | | AACCC | | present disclosure |
| 1838 | GGUUUUAAAAUUAAAGU | 13 | UUAUACUUUAAUUUUAAA | 26 | Sequence of the |
| | AUAA | | ACCCA | | present disclosure |
| 791P | UUGUGAAACAAAAAAGU | 512 | ACACUUUUUUGUUUCACA | 525 | CN106574268B |
| | GUUU | | AUU | | |
| 1791 | UUGUGAAACAAAAAAGU | 8 | UAACACUUUUUUGUUUCA | 21 | Sequence of the |
| | GUUA | | CAAAC | | present disclosure |

[0556] As shown in Table 30:

[0557] Compared to sequence 1579 of the present disclosure, sequence 579P disclosed in the prior art has one additional base A at the 5′ end of the sense strand, differs in one base U at the 3′ end of the sense strand, differs in one base A at the 5′ end of the antisense strand, and has one additional base G at the 3′ end of the antisense strand.

[0558] Compared to sequence 1789 of the present disclosure, sequence 789P disclosed in the prior art lacks one base G at the 5′ end of the sense strand, differs in one base A at the 3′ end of the sense strand, differs in one base U at the 5′ end of the antisense strand, and lacks one base A at the 3′ end of the antisense strand.

[0559] Compared to sequence 1812 of the present disclosure, sequence 812P disclosed in the prior art lacks one base A at the 3′ end of the sense strand and lacks one base U at the 5′ end of the antisense strand.

[0560] Compared to sequence 1576s of the present disclosure, sequence 576P disclosed in the prior art differs in two bases GU at the 3′ end of the sense strand and differs in two bases AC at the 5′ end of the antisense strand.

[0561] Compared to sequence 1578s of the present disclosure, sequence 578P disclosed in the prior art has one additional base C at the 5′ end of the sense strand and has one additional base G at the 3′ end of the antisense strand.

[0562] Compared to sequence 1585s of the present disclosure, sequence 585P disclosed in the prior art lacks one base C at the 5′ end of the sense strand and lacks three bases GAA at the 3′ end of the antisense strand.

[0563] Compared to sequence 1816 of the present disclosure, sequence 816P disclosed in the prior art lacks one base U at the 5′ end of the sense strand, differs in one base U at the 5′ end of the antisense strand, and lacks one base A at the 3′ end of the antisense strand.

[0564] Compared to sequence 1835 of the present disclosure, sequence 835P disclosed in the prior art lacks two bases UU at the 5′ end of the sense strand and lacks two bases UU at the 3′ end of the antisense strand.

[0565] Compared to sequence 1836 of the present disclosure, sequence 836P disclosed in the prior art lacks two bases UG at the 5′ end of the sense strand and lacks two bases AU at the 3′ end of the antisense strand.

[0566] Compared to sequence 1839 of the present disclosure, sequence 839P disclosed in the prior art has an identical sense strand but lacks two bases UG at the 5′ end of the antisense strand. Compared to sequence 1838 of the present disclosure, sequence 839P disclosed in the prior art lacks one base G at the 5′ end of the sense strand, differs in two bases CA at the 3′ end of the sense strand, lacks one base U at the 5′ end of the antisense strand, and lacks one base A at the 3′ end of the antisense strand.

[0567] Compared to sequence 1791 of the present disclosure, sequence 791P disclosed in the prior art differs in one base U at the 3′ end of the sense strand, lacks two bases UA at the 5′ end of the antisense strand, and differs in two bases UU at the 3′ end of the antisense strand.

### II. Activity Comparison

1) The unmodified sequences of the present disclosure exhibited significantly enhanced activity compared to the structurally similar unmodified sequences disclosed in the prior art. For example, unmodified sequence 1576s of the present disclosure exhibited a 20.9% increase in inhibition rate compared to the structurally similar 576P (FIG. 6).

[0568] Unmodified sequence 1579 of the present disclosure exhibited an inhibition rate of 58.2% on AGT gene expression, which was 11.2% higher than that of the structurally similar sequence 579P disclosed in the prior art (inhibition rate of 47%), indicating a significant improvement.

[0569] Unmodified sequence 1789 of the present disclosure exhibited an inhibition rate of 54.5% on AGT gene expression, which was 2.6% higher than that of the structurally similar sequence 789P disclosed in the prior art (inhibition rate of 51.9%).

[0570] Unmodified sequence 1812 of the present disclosure exhibited an inhibition rate of 56.8% on AGT gene expression, which was 14.3% higher than that of the structurally similar sequence 812P disclosed in the prior art (inhibition rate of 42.5%), indicating a significant improvement.

[0571] Unmodified sequence 1576s of the present disclosure exhibited an inhibition rate of 59.1% on AGT gene expression, which was 20.9% higher than that of the structurally similar sequence 576P disclosed in the prior art (inhibition rate of 38.2%), indicating a significant improvement.

[0572] Unmodified sequence 1578s of the present disclosure exhibited an inhibition rate of 55.2% on AGT gene expression, which was 21.6% higher than that of the structurally similar sequence 578P disclosed in the prior art (inhibition rate of 33.6%), indicating a significant improvement.

[0573] Unmodified sequence 1585s of the present disclosure exhibited an inhibition rate of 48.9% on AGT gene expression, which was 1.57% higher than that of the structurally similar sequence 585P disclosed in the prior art (inhibition rate of 47.33%).

[0574] Unmodified sequence 1816 of the present disclosure exhibited an inhibition rate of 46.8% on AGT gene expression, which was −17.7% higher than that of the structurally similar sequence 816P disclosed in the prior art (inhibition rate of 64.5%), indicating a significant improvement.

[0575] Unmodified sequence 1835 of the present disclosure exhibited an inhibition rate of 51.6% on AGT gene expression, which was 37.7% higher than that of the structurally similar sequence 835P disclosed in the prior art (inhibition rate of 13.9%), indicating a significant improvement.

[0576] Unmodified sequence 1836 of the present disclosure exhibited an inhibition rate of 46.5% on AGT gene expression, which was 4.6% higher than that of the structurally similar sequence 836P disclosed in the prior art (inhibition rate of 41.9%).

[0577] Unmodified sequence 1839 of the present disclosure exhibited an inhibition rate of 45.7% on AGT gene expression, which was 61.1% higher than that of the structurally similar sequence 839P disclosed in the prior art (inhibition rate of −15.4%), indicating a significant improvement.

[0578] Unmodified sequence 1838 of the present disclosure exhibited an inhibition rate of 50.6% on AGT gene expression, which was 66.0% higher than that of the structurally similar sequence 839P disclosed in the prior art (inhibition rate of −15.4%), indicating a significant improvement.

[0579] Unmodified sequence 1791 of the present disclosure exhibited an inhibition rate of 46.5% on AGT gene expression, which was 4.3% lower than that of the structurally similar sequence 791P disclosed in the prior art (inhibition rate of 50.8%).

2) The alternately modified sequences of the present disclosure exhibited significantly enhanced activity compared to the structurally similar unmodified sequences disclosed in the prior art. For example, the alternately modified sequence B1579-AL of the present disclosure exhibited a 14.1% increase in inhibition rate compared to sequence 579P.

[0580] After unmodified sequence 1579 of the present disclosure was alternately modified, the resulting sequence B1579-AL exhibited an inhibition rate of 61.1% on AGT gene expression, which was 14.1% higher than that of unmodified sequence 579P disclosed in the prior art, indicating a significant improvement.

[0581] After unmodified sequence 1789 of the present disclosure was alternately modified, the resulting sequence B1789-AL exhibited an inhibition rate of 63.5% on AGT gene expression, which was 11.6% higher than that of unmodified sequence 789P disclosed in the prior art, indicating a significant improvement.

[0582] After unmodified sequence 1812 of the present disclosure was alternately modified, the resulting sequence B1812-AL exhibited an inhibition rate of 62.9% on AGT gene expression, which was 20.4% higher than that of unmodified sequence 812P disclosed in the prior art, indicating a significant improvement.

[0583] After unmodified sequence 1576s of the present disclosure was alternately modified, the resulting sequence B1576s-AL exhibited an inhibition rate of 64.6% on AGT gene expression, which was 26.4% higher than that of unmodified sequence 576P disclosed in the prior art, indicating a significant improvement.

[0584] After unmodified sequence 1578s of the present disclosure was alternately modified, the resulting sequence B1578s-AL exhibited an inhibition rate of 63.9% on AGT gene expression, which was 30.3% higher than that of unmodified sequence 578P disclosed in the prior art, indicating a significant improvement.

[0585] After unmodified sequence 1585s of the present disclosure was alternately modified, the resulting sequence B1585s-AL exhibited an inhibition rate of 59.3% on AGT gene expression, which was 11.97% higher than that of unmodified sequence 585P disclosed in the prior art, indicating a significant improvement.

[0586] After unmodified sequence 1816 of the present disclosure was alternately modified, the resulting sequence B1816-AL exhibited an inhibition rate of 60.9% on AGT gene expression, which was 3.6% lower than that of unmodified sequence 816P disclosed in the prior art.

[0587] After unmodified sequence 1835 of the present disclosure was alternately modified, the resulting sequence B1835-AL exhibited an inhibition rate of 62.3% on AGT gene expression, which was 48.4% higher than that of unmodified sequence 835P disclosed in the prior art, indicating a significant improvement.

[0588] After unmodified sequence 1836 of the present disclosure was alternately modified, the resulting sequence B1836-AL exhibited an inhibition rate of 59.8% on AGT gene expression, which was 17.9% higher than that of unmodified sequence 836P disclosed in the prior art, indicating a significant improvement.

[0589] After unmodified sequence 1839 of the present disclosure was alternately modified, the resulting sequence B1839-AL exhibited an inhibition rate of 59.1% on AGT gene expression, which was 74.5% higher than that of unmodified sequence 839P disclosed in the prior art, indicating a significant improvement.

[0590] After unmodified sequence 1838 of the present disclosure was alternately modified, the resulting sequence B1838-AL exhibited an inhibition rate of 63.6% on AGT gene expression, which was 79% higher than that of unmodified sequence 839P disclosed in the prior art, indicating a significant improvement.

[0591] After unmodified sequence 1791 of the present disclosure was alternately modified, the resulting sequence B1791-AL exhibited an inhibition rate of 61.8% on AGT gene expression, which was 11% higher than that of unmodified sequence 791P disclosed in the prior art, indicating a significant improvement.

3) The sequences modified using the modification templates of the present disclosure exhibited significantly enhanced activity compared to the structurally similar unmodified sequences disclosed in the prior art. For example, the modified sequence C1579-DV26P of the present disclosure exhibited a 25.2% increase in inhibition rate compared to sequence 579P.

[0592] After modification with templates DV25P-29P, unmodified sequence 1579 of the present disclosure exhibited a 20% or more increase in inhibition rate compared to unmodified sequence 579P disclosed in the prior art. For example, C1579-DV26P exhibited a 25.2% increase, indicating a significant improvement.

[0593] After modification with templates DV25P-29P, unmodified sequence 1789 of the present disclosure exhibited a 20% or more increase in inhibition rate compared to unmodified sequence 789P disclosed in the prior art. For example, C1789-DV26P exhibited a 21.7% increase, indicating a significant improvement.

[0594] After modification with templates DV25P-29P, unmodified sequence 1812 of the present disclosure exhibited a 30% or more increase in inhibition rate compared to unmodified sequence 812P disclosed in the prior art. For example, C1812-DV25P exhibited a 31.9% increase, indicating a significant improvement.

[0595] After modification with templates DV25P-29P, unmodified sequence 1576s of the present disclosure exhibited a 40% or more increase in inhibition rate compared to unmodified sequence 576P disclosed in the prior art. For example, C1576s-DV29P exhibited a 41.1% increase, indicating a significant improvement.

[0596] After modification with templates DV25P-29P, unmodified sequence 1578s of the present disclosure exhibited a 40% or more increase in inhibition rate compared to unmodified sequence 578P disclosed in the prior art. For example, C1578s-DV29P exhibited a 43.5% increase, indicating a significant improvement.

[0597] After modification with templates DV25P-29P, unmodified sequence 1585s of the present disclosure exhibited a 10% or more increase in inhibition rate compared to unmodified sequence 585P disclosed in the prior art. For example, C1585s-DV27P exhibited a 17.27% increase, indicating a significant improvement.

[0598] After modification with templates DV25P-29P, unmodified sequence 1816 of the present disclosure exhibited a non-significant increase in inhibition rate compared to unmodified sequence 816P disclosed in the prior art.

[0599] After modification with templates DV25P-29P, unmodified sequence 1835 of the present disclosure exhibited a 50% or more increase in inhibition rate compared to unmodified sequence 835P disclosed in the prior art. For example, C1835-DV26P exhibited a 57.9% increase, indicating a significant improvement.

[0600] After modification with templates DV25P-29P, unmodified sequence 1836 of the present disclosure exhibited a 20% or more increase in inhibition rate compared to unmodified sequence 836P disclosed in the prior art. For example, C1836-DV26P exhibited a 21.9% increase, indicating a significant improvement.

[0601] After modification with templates DV25P-29P, unmodified sequence 1839 of the present disclosure exhibited a 70% or more increase in inhibition rate compared to unmodified sequence 839P disclosed in the prior art. For example, C1839-DV29P exhibited a 79.6% increase, indicating a significant improvement.

[0602] After modification with templates DV25P-29P, unmodified sequence 1838 of the present disclosure exhibited a 90% or more increase in inhibition rate compared to unmodified sequence 839P disclosed in the prior art. For example, C1838-DV29P exhibited a 91% increase, indicating a significant improvement.

[0603] After modification with templates DV25P-29P, unmodified sequence 1791 of the present disclosure exhibited a 10% or more increase in inhibition rate compared to unmodified sequence 791P disclosed in the prior art. For example, C1791-DV26P exhibited a 19.5% increase, indicating a significant improvement.

[0604] Thus, compared to the structurally similar unmodified sequences in the prior art, the unmodified sequences of the present disclosure, as well as the alternately modified and template-modified sequences thereof, exhibited significantly enhanced AGT inhibitory activity, with an increase of up to 91% in inhibition rate.

### SUMMARY

[0605] Compared to the structurally similar sequences disclosed in the prior art, the unmodified sequences, alternately modified sequences, and sequences modified with specific modification templates in the present disclosure exhibited significantly enhanced inhibitory effects on AGT gene expression. For example, unmodified sequence 1839 of the present disclosure exhibited a 61.1% increase in inhibition rate compared to the structurally similar sequence 839P disclosed in the prior art. The alternately modified sequence B1835-AL of the present disclosure, derived from sequence 1835, exhibited a 48.4% increase in inhibition rate compared to unmodified sequence 835P disclosed in the prior art, which was structurally similar to sequence 1835. After sequence 1812 was modified with template DV25P of the present disclosure, the resulting sequence C1812-DV25P exhibited a 31.9% increase in inhibition rate compared to unmodified sequence 812P disclosed in the prior art, which was structurally similar to sequence 1812.

### Example 6: Off-Target Effect Assay of Modified Sequences

[0606] In practical applications of siRNA, there are numerous instances where the expression of non-target mRNAs, which are only partially complementary to the guide strand (antisense strand), is inhibited. Research by Alnylam Pharmaceuticals has demonstrated that the hepatotoxicity of N-acetylgalactosamine (GalNAc)-conjugated siRNAs is primarily attributed to off-target effects resulting in gene suppression of incorrect targets through a microRNA (miRNA)-like recognition mechanism.

[0607] To investigate whether the sequences of the present disclosure would produce off-target effects, in this example, the inhibitory effects of the high-activity sequences from Example 4 on potential off-target genes in HepG2 cells were examined, and compared with Zilebesiran, a drug currently in Phase II clinical trials. For 13 sequences, including C1576s-DV29P, C1578s-DV29P, C1579-DV25P, C1789-DV25P, C1789-DV26P, C1791-DV26P, C1795-DV27P, C1812-DV25P, C1816-DV25P, C1835-DV26P, C1838-DV29P, and C1585s-DV27P, potential off-target genes with high sequence similarity were identified via BLAST analysis. C1585s-DV27P showed no significant sequence similarity to any known genes and was therefore excluded from off-target testing. The remaining 12 sequences exhibited significant inhibitory effects on AGT expression at concentrations ranging from 16 pM to 10 nM; all of which except C1578s-DV29P and C1835-DV26P showed no significant inhibitory effects on potential off-target genes (IC₅₀ values differed by 200-fold or more).

### 1. Experimental Materials

### 1) Test Samples:

[0608] The 12 high-activity sequences from Example 4, along with the positive control sequence APC-ZL (Table 31). APC-ZL is the Zilebesiran sequence without a GalNAc delivery vector.

TABLE 31
Template-modified sequences

| Sequence | | Seq | Antisense strand | Seq |
|---|---|---|---|---|
| ID | Sense strand sequence 5′-3′ | ID | sequence 5′-3′ | ID |
| C1576s- | Cms-Cms-Am-Cm-Cm-Uf-Um-Uf- | 423 | UmsEVP-Ufs-Cm-Af-Uf-Uf-Am- | 488 |
| DV29P | Um-Cf-Um-Um-Cm-Um-Am-Af-Um- | | Gm-Am-Am-Gm-Am-Am-Af-Am- | |
| | Gm-Am-Am | | Gf-Gm-Um-Gm-Gms-Gms-Am | |
| C1578s- | Ams-Cms-Cm-Um-Um-Uf-Um-Cf- | 426 | UmsEVP-Afs-Cm-Uf-Cf-Af-Um- | 492 |
| DV29P | Um-Uf-Cm-Um-Am-Am-Um-Gf-Am- | | Um-Am-Gm-Am-Am-Gm-Af-Am- | |
| | Gm-Um-Am | | Af-Am-Gm-Gm-Ums-Gms-Gm | |
| C1579- | Cms-Cms-Um-Um-Um-Um-Cf-Um- | 407 | UmsEVP-Cfs-Gm-Am-Cm-Uf-Cm- | 457 |
| DV25P | Uf-Cf-Uf-Am-Am-Um-Gm-Am-Gf- | | Am-Um-Um-Am-Gm-Am-Af-Gm- | |
| | Um-Cm-Gm-Am | | Af-Am-Am-Am-Gm-Gms-Ums-Gm | |
| C1789- | Gms-Ums-Um-Um-Gm-Um-Gf-Am- | 412 | AmsEVP-Cfs-Am-Cm-Um-Uf-Um- | 468 |
| DV25P | Af-Af-Cf-Am-Am-Am-Am-Am-Af- | | Um-Um-Um-Gm-Um-Um-Uf-Cm- | |
| | Gm-Um-Gm-Um | | Af-Cm-Am-Am-Am-Cms-Ams-Am | |
| C1789- | Gms-Ums-Um-Um-Gm-Um-Gf-Am- | 412 | AmsEVP-Cfs-Af-Cf-Um-Uf-Um- | 465 |
| DV26P | Af-Af-Cf-Am-Am-Am-Am-Am-Af- | | Um-Um-Um-Gm-Um-Um-Uf-Cm- | |
| | Gm-Um-Gm-Um | | Af-Cm-Am-Am-Am-Cms-Ams-Am | |
| C1791- | Ums-Ums-Gm-Um-Gm-Am-Af-Am- | 417 | UmsEVP-Afs-Af-Cf-Am-Cf-Um- | 476 |
| DV26P | Cf-Af-Af-Am-Am-Am-Am-Gm-Uf- | | Um-Um-Um-Um-Um-Gm-Uf-Um- | |
| | Gm-Um-Um-Am | | Uf-Cm-Am-Cm-Am-Ams-Ams-Cm | |
| C1795- | Gms-Ams-Am-Am-Cm-Am-Af-Am- | 419 | AmsEVP-Afs-Gm-Gf-Gf-Af-Am- | 479 |
| DV27P | Af-Af-Af-Gm-Um-Gm-Um-Um-Cf- | | Cm-Am-Cm-Um-Um-Um-Uf-Um- | |
| | Cm-Cm-Um-Um | | Uf-Gm-Um-Um-Um-Cms-Ams-Cm | |
| C1812- | Cms-Cms-Um-Um-Um-Um-Cf-Am- | 404 | UmsEVP-Ufs-Um-Gm-Um-Uf-Cm- | 450 |
| DV25P | Af-Gf-Uf-Um-Gm-Am-Gm-Am-Af- | | Um-Cm-Am-Am-Cm-Um-Uf-Gm- | |
| | Cm-Am-Am-Am | | Af-Am-Am-Am-Gm-Gms-Gms-Am | |
| C1816- | Ums-Ums-Cm-Am-Am-Gm-Uf-Um- | 401 | AmsEVP-Afs-Um-Um-Um-Uf-Um- | 443 |
| DV25P | Gf-Af-Gf-Am-Am-Cm-Am-Am-Af- | | Gm-Um-Um-Cm-Um-Cm-Af-Am- | |
| | Am-Am-Um-Um | | Cf-Um-Um-Gm-Am-Ams-Ams-Am | |
| C1835- | Ums-Ums-Gm-Gm-Gm-Um-Uf-Um- | 398 | UmsEVP-Afs-Cf-Uf-Um-Uf-Am- | 433 |
| DV26P | Uf-Af-Af-Am-Am-Um-Um-Am-Af- | | Am-Um-Um-Um-Um-Am-Af-Am- | |
| | Am-Gm-Um-Am | | Af-Cm-Cm-Cm-Am-Ams-Ums-Um | |
| C1838- | Gms-Gms-Um-Um-Um-Um-Af-Am- | 429 | UmsEVP-Ufs-Am-Uf-Af-Cf-Um- | 496 |
| DV29P | Af-Am-Uf-Um-Am-Am-Am-Gm-Uf- | | Um-Um-Am-Am-Um-Um-Uf-Um- | |
| | Am-Um-Am-Am | | Af-Am-Am-Am-Cm-Cms-Cms-Am | |
| C1839- | Gms-Ums-Um-Um-Um-Am-Af-Am- | 414 | UmsEVP-Gfs-Um-Af-Uf-Af-Cm- | 471 |
| DV29P | Af-Um-Uf-Am-Am-Am-Gm-Um-Af- | | Um-Um-Um-Am-Am-Um-Uf-Um- | |
| | Um-Am-Cm-Am | | Uf-Am-Am-Am-Am-Cms-Cms-Cm | |
| APC-ZL | Gms-Ums-Cm-Am-Um-Cm-Cf-Am- | 563 | Ums-Gfs-Um-Am-Cm-Tgna-Cm- | 587 |
| | Cf-Af-Af-Um-Gm-Am-Gm-Am-Gm- | | Um-Cm-Am-Um-Um-Gm-Uf-Gm- | |
| | Um-Am-Cm-Am | | Gf-Am-Um-Gm-Am-Cms-Gms-Am | |

[0609] Cell type: HepG2 cells, provided by Cyagen (H1-1701).
[0610] HepG2 cells were cultured in DMEM medium (ATCC-30-2003) containing 10% fetal bovine serum (FBS, ExCell Bio-FSP500) and 1% penicillin-streptomycin (HyClone-SV30010).
[0611] Drug vehicle: sterile nuclease-free water, Gibco Opti-MEM.

### 2. Experimental Methods

[0612] The inhibitory effects of the test samples on the mRNA expression of AGT genes in HepG2 cell lines were tested by qRT-PCR.

### 2.1 Cell Culture

[0613] HepG2 cells in the logarithmic growth phase were harvested from subcultured stocks and cultured in DMEM medium containing 10% fetal bovine serum (supplemented with 100 μL/mL of penicillin and streptomycin). The cells were incubated in a cell culture incubator at 37° C. with 5% CO₂, with medium replaced daily. For subculture, the cells were digested with 0.25% trypsin, centrifuged at 1000 rpm for 5 minutes, and the supernatant was discarded. Fresh medium was added for subculture.

### 2.2 Cell Transfection

[0614] Preparation of transfection mixture: Lipofectamine RNAiMAX and Opti-MEM were mixed at a ratio of 2:98 and vortexed thoroughly.

[0615] Preparation of transfection reagent: 60 μL of siRNA solution diluted in Opti-MEM was mixed with 60 μL of the prepared transfection mixture at a ratio of 1:1 (v/v), vortexed thoroughly, and the mixture was incubated at room temperature for 15 minutes to obtain lipid nanoparticles (LNPs). A 12.5 μL aliquot was taken for encapsulation efficiency analysis.

[0616] Blank control transfection reagent: 60 μL of the prepared transfection mixture was added to 60 μL of Opti-MEM, vortexed thoroughly, and the mixture was incubated at room temperature for 15 minutes.

[0617] The prepared transfection reagent was added to a 24-well cell culture plate (100 μL per well), resulting in a final siRNA concentration of 0.016 nM/0.08 nM/0.4 nM/2 nM/10 nM per well. 500 μL of cell suspension (1.5×10⁵ cells per mL) was added per well. After mixing by crosswise method, the plate was incubated in a cell culture incubator at 37° C. with 5% CO₂ for 40 hours.

### 2.3 RNA Extraction and Reverse Transcription

[0618] After 24 hours of transfection, the medium was removed and the cells were collected for RNA extraction. Total RNA was extracted using the RNeasy® 96 Kit (QIAGEN-74182) according to the instructions provided by the manufacturer. Subsequently, cDNA was synthesized using the FastKing RT Kit (With gDNase) (TIANGEN-KR116-02) according to the instructions provided by the manufacturer.

### 2.4 RT-qPCR

[0619] Refer to “Quantitative analysis of AGT mRNA” under Section 2.3 in Example 2.

### 2.5 Data Analysis

[0620] The RNA expression levels of target genes in samples were calculated based on Ct values using the ΔΔCt relative quantification method. The relative expression levels of target genes were expressed as 2^{-ΔΔCt}.

### The Calculation Formula is as Follows:

$$Δ Ct = Average Ct value of target gene - Average Ct value of reference gene ;$$

$$ΔΔ Ct = Δ Ct ( treatment group ) - Δ Ct ( RNAiMAX control group ) ;$$

$$Relative m R N A expression level of target gene = {2}^{- ΔΔ Ct} ;$$

$$Inhibition rate = ( 1 - relative expression level of sample / average expression level of RNAiMAX control ) \times 100 \% .$$

### 3. Experimental Results

3.1 All sequences exhibited significant inhibitory effects on AGT gene expression. For example, C1576s-DV29P exhibited an inhibition rate of 83.8% against AGT at 10 nM.

[0621] The inhibition rates of these sequence against AGT at various concentrations are shown in Table 32 below. All sequences exhibited significant inhibitory effects against AGT. For example, C1576s-DV29P exhibited an inhibition rate of 83.8% against AGT at 10 nM.

TABLE 32
Inhibition rates of sequences against AGT at various concentrations

| | AGT inhibition rate (%) | | | | |
|---|---|---|---|---|---|
| Sequence name | 10.0 nM | 2.0 nM | 0.4 nM | 0.08 nM | 0.016 nM |
| C1576s-DV29P | 83.8 | 81.3 | 82.4 | 68.9 | 56.1 |
| C1578s-DV29P | 85.7 | 84.9 | 82.6 | 77.5 | 66.7 |
| C1579-DV25P | 85.0 | 84.9 | 82.7 | 77.9 | 58.3 |
| C1789-DV25P | 82.6 | 84.2 | 82.1 | 79.6 | 66.1 |
| C1789-DV26P | 79.3 | 82.8 | 81.3 | 78.8 | 64.5 |
| C1791-DV26P | 86.3 | 87.4 | 83.7 | 76.0 | 57.9 |
| C1795-DV27P | 87.4 | 84.1 | 83.1 | 74.2 | 57.8 |
| C1812-DV25P | 88.2 | 88.0 | 86.8 | 82.5 | 66.4 |
| C1816-DV25P | 84.5 | 83.8 | 80.2 | 73.5 | 56.3 |
| C1835-DV26P | 89.2 | 88.3 | 88.4 | 82.4 | 72.2 |
| C1838-DV29P | 80.0 | 79.3 | 80.8 | 74.1 | 52.4 |
| C1839-DV29P | 82.2 | 83.2 | 81.8 | 73.8 | 64.9 |
| APC-ZL | 90.7 | 87.4 | 76.5 | 76.4 | 53.9 |

3.2 C1578s-DV29P and C1835-DV26P exhibited certain off-target effects, while other sequences showed no significant off-target activity.

[0622] The inhibition rates and IC₅₀ values of these sequences against AGT and potential off-target genes at various concentrations are shown in Table 33 below.

TABLE 33
Inhibition rates and IC₅₀ values of sequences against
potential off-target genes at various concentrations

| | | Inhibition rate (%) | | | | | | |
|---|---|---|---|---|---|---|---|---|
| Sequence name | Gene name | 10.0 nM | 2.0 nM | 0.4 nM | 0.08 nM | 0.016 nM | IC₅₀/nM | Ratio |
| C1576s-DV29P | AGT | 83.8 | 81.3 | 82.4 | 68.9 | 56.1 | <0.016 | 1.0 |
| | DSE | −138.9 | −89.7 | −79.0 | −7.1 | −70.7 | >10.0 | >625.0 |
| C1578s-DV29P | AGT | 85.7 | 84.9 | 82.6 | 77.5 | 66.7 | 0.004 | 1.0 |
| | MIA2 | −12.9 | −4.3 | −13.5 | 4.0 | −3.8 | >10.0 | >2500.0 |
| | CHST15 | 57.9 | 63.1 | 64.0 | 63.6 | 5.0 | 0.019 | 4.8 |
| | ERRFI1 | 66.9 | 65.9 | 69.9 | 74.1 | 16.3 | 0.021 | 5.3 |
| C1579-DV25P | AGT | 85.0 | 84.9 | 82.7 | 77.9 | 58.3 | 0.011 | 1.0 |
| | GLTP | 42.3 | 17.4 | −43.6 | −91.0 | −136.7 | >10.0 | >909.1 |
| C1789-DV25P | AGT | 82.6 | 84.2 | 82.1 | 79.6 | 66.1 | 0.008 | 1.0 |
| | MRPL42 | 2.7 | −2.0 | −19.6 | 3.6 | −16.6 | >10.0 | >1250.0 |
| | NSD3 | 15.0 | 9.1 | −15.4 | 8.5 | −4.5 | >10.0 | >1250.0 |
| | LUC7L | 15.9 | 13.0 | −2.2 | 1.8 | −8.9 | >10.0 | >1250.0 |
| C1789-DV26P | AGT | 79.3 | 82.8 | 81.3 | 78.8 | 64.5 | <0.016 | 1.0 |
| | MRPL42 | 14.6 | −7.5 | −21.2 | −22.6 | −21.4 | >10.0 | >625.0 |
| | NSD3 | 28.2 | 16.7 | −7.0 | −25.8 | −24.4 | >10.0 | >625.0 |
| | LUC7L | 21.8 | 10.7 | −0.5 | −13.4 | −12.8 | >10.0 | >625.0 |
| C1791-DV26P | AGT | 86.3 | 87.4 | 83.7 | 76.0 | 57.9 | 0.008 | 1.0 |
| | ORC2 | −58.0 | −69.3 | −105.6 | −54.9 | −4.4 | >10.0 | >1250.0 |
| | RBM23 | −24.7 | −81.8 | −97.9 | −48.2 | 1.3 | >10.0 | >1250.0 |
| | SLC2A13 | 2.1 | −2.0 | −8.7 | 8.0 | −5.9 | >10.0 | >1250.0 |
| | KANK1 | 21.8 | 25.7 | 1.1 | 20.7 | −11.8 | >10.0 | >1250.0 |
| | LUC7L | 25.5 | 22.0 | 14.9 | 8.8 | −13.6 | >10.0 | >1250.0 |
| C1795-DV27P | AGT | 87.4 | 84.1 | 83.1 | 74.2 | 57.8 | 0.010 | 1.0 |
| | BCKDHB | 16.6 | −2.3 | −5.8 | −14.2 | −7.6 | >10.0 | >1000.0 |
| | ACBD5 | 25.7 | 5.5 | 1.4 | −1.7 | −1.0 | >10.0 | >1000.0 |
| | MPDZ | 12.0 | −8.2 | 7.9 | −10.9 | 1.6 | >10.0 | >1000.0 |
| | TRIP11 | 2.7 | −23.4 | −30.1 | −23.8 | −0.7 | >10.0 | >1000.0 |
| | WDPCP | 14.4 | 6.2 | −16.2 | −6.2 | −3.2 | >10.0 | >1000.0 |
| C1812-DV25P | AGT | 88.2 | 88.0 | 86.8 | 82.5 | 66.4 | 0.008 | 1.0 |
| | ISOC1 | −11.1 | −15.4 | −34.8 | −20.6 | −14.5 | >10.0 | >1250.0 |
| | ATXN10 | −21.9 | −19.0 | −30.1 | −11.7 | −10.3 | >10.0 | >1250.0 |
| | PARP14 | −58.2 | −102.4 | −110.3 | −20.2 | −24.9 | >10.0 | >1250.0 |
| | SRGAP1 | −53.4 | −45.6 | −46.1 | −14.9 | −3.2 | >10.0 | >1250.0 |
| C1816-DV25P | AGT | 84.5 | 83.8 | 80.2 | 73.5 | 56.3 | 0.011 | 1.0 |
| | FOXN3 | 48.6 | 40.8 | 25.8 | 16.7 | 18.0 | >10.0 | >909.1 |
| C1835-DV26P | AGT | 89.2 | 88.3 | 88.4 | 82.4 | 72.2 | <0.016 | 1.0 |
| | MTF2 | 15.3 | −5.6 | 0.2 | −8.1 | −1.8 | 12.227 | 764.2 |
| | CCNA2 | 74.6 | 50.3 | 22.0 | −9.8 | 4.3 | 1.766 | 110.4 |
| | SMNDC1 | −24.5 | −30.7 | −22.1 | −30.3 | −12.9 | >10.0 | >625.0 |
| | ZNF107 | 14.1 | 3.3 | −4.6 | −19.6 | 0.2 | >10.0 | >625.0 |
| | RFC3 | 43.3 | 18.3 | 5.2 | −8.7 | 7.7 | >10.0 | >625.0 |
| C1838-DV29P | AGT | 80.0 | 79.3 | 80.8 | 74.1 | 52.4 | <0.016 | 1.0 |
| | AKAP9 | −45.3 | −55.3 | −37.0 | −9.6 | −13.0 | >10.0 | >625.0 |
| | DENR | 19.2 | −3.6 | −26.3 | −7.9 | −31.1 | >10.0 | >625.0 |
| | PGRMC1 | 40.9 | 6.1 | −27.2 | −13.9 | −18.9 | >10.0 | >625.0 |
| | ZNF626 | 20.3 | −0.6 | −5.2 | −6.8 | 3.1 | >10.0 | >625.0 |
| C1839-DV29P | AGT | 82.2 | 83.2 | 81.8 | 73.8 | 64.9 | <0.016 | 1.0 |
| | GRB14 | 5.8 | −11.9 | −4.7 | −12.4 | −42.1 | >10.0 | >625.0 |
| | JADE1 | −38.2 | −26.1 | −40.0 | −46.0 | −43.5 | >10.0 | >625.0 |
| | STAT5B | 13.2 | 0.3 | −6.5 | −25.4 | −0.4 | >10.0 | >625.0 |
| | ABCD3 | 35.4 | 18.2 | −0.8 | −3.2 | −0.8 | >10.0 | >625.0 |
| APC-ZL | AGT | 90.7 | 87.4 | 76.5 | 76.4 | 53.9 | 0.012 | 1.0 |
| | BAP1 | 24.4 | 14.1 | 14.0 | 2.1 | 21.7 | >10.0 | >833.3 |
| | NFAT5 | 2.4 | −8.0 | 10.4 | 0.6 | −17.5 | >10.0 | >833.3 |
| | ZNF460 | 40.6 | 42.1 | 30.3 | 27.1 | 12.8 | >10.0 | >833.3 |

### As Shown in the Above Table:

[0623] (1) Some sequences exhibited minimal inhibitory effects on potential off-target genes. For example, C1789-DV25P exhibited an inhibition rate of only 2.700 against MRPL42 at 10 nM, indicating no significant inhibitory effects.
[0624] (2) Some sequences exhibited certain inhibitory effects on potential off-target genes at high concentrations, but the IC₅₀ for inhibiting off-target genes was significantly higher than the IC₅₀ for inhibiting AGT. For example, C1579-DV25P exhibited an inhibition rate of 42.3% against GLTP at 10 nM, but the IC₅₀ against GLTP was greater than 10 nM, while the IC₅₀ against AGT was 0.011 nM, with a ratio far exceeding 200, indicating no significant off-target effects.
[0625] (3) C1578s-DV29P exhibited an inhibition rate of 66.9% against ERRFI1 at 10 nM with an IC₅₀ of 0.021 nM, while the IC₅₀ against AGT was 0.004 nM, with an IC₅₀ ratio of only 5.3; C1835-DV26P exhibited an inhibition rate of 74.6% against CCNA2 at 10 nM with an IC₅₀ of 1.766 nM, while the IC₅₀ against AGT was less than 0.016 nM, with a minimum IC₅₀ ratio of 110.4. These two sequences were considered to have certain off-target effects, requiring anti-off-target modifications to reduce their inhibition of off-target genes.

### SUMMARY

[0626] (1) All sequences exhibited significant inhibitory effects against AGT. For example, C1576s-DV29P exhibited an inhibition rate of 83.8% against AGT at 10 nM.
[0627] (2) C1578s-DV29P and C1835-DV26P exhibited certain off-target effects, while other sequences showed no significant off-target activity.

### Example 7: Inhibition of Sequences with Specific Anti-Off-Target Designs on AGT and Off-Target Genes

[0628] In practical applications of siRNA, there are numerous instances where the expression of non-target mRNAs, which are only partially complementary to the guide strand (antisense strand), is inhibited. Research by Alnylam Pharmaceuticals has demonstrated that the hepatotoxicity of N-acetylgalactosamine (GalNAc)-conjugated siRNAs is primarily attributed to off-target effects resulting in gene suppression of incorrect targets through a microRNA (miRNA)-like recognition mechanism.

[0629] To address the issue, Alnylam Pharmaceuticals incorporated a glycol nucleic acid (GNA) modification at position 7 of the antisense strand in their latest fifth-generation siRNA template design to disrupt the seed region of the antisense strand, thereby significantly reducing off-target effects and mitigating hepatotoxicity. Such modifications can interfere with the binding of siRNA to unintended targets via seed region recognition, thereby inhibiting off-target effects.

[0630] In addition, a study in 2008 revealed that replacing all eight base pairs at the 5′ end of the antisense strand of double-stranded siRNA with DNA significantly reduced off-target effects without compromising the activity of siRNA. Research on mRNA cleavage sites revealed that DNA substitution did not interfere with RISC-mediated mRNA cleavage between nucleotides at positions 10 and 11 of the antisense strand but did interfere with cleavage at non-canonical sites, possibly by inhibiting non-specific cleavage of double-stranded RNA by RNase.

[0631] Based on the above findings, in order to reduce off-target effects for sequences, DV25-29P were used in this example to modify unmodified sequences 1578s and 1835, by replacing the nucleotides at position 7 or positions 6 and 7 of the antisense strand with DNA, while also replacing the nucleotides at complementary positions of the sense strand with DNA to reduce off-target effects. These two anti-off-target modifications were compared with an anti-off-target design using an (S)-GNA substitution at position 7 of the antisense strand.

[0632] The experimental results demonstrated that the sequences with anti-off-target designs exhibited significant inhibitory effects on the target gene AGT at concentrations ranging from 10 nM to 16 pM, while some sequences exhibited significantly reduced inhibitory effects on off-target genes. The findings indicate that introducing anti-off-target designs does not compromise the inhibitory effects of the alternately modified and template-modified sequences of the present disclosure on AGT gene expression, but can effectively inhibit off-target effects for some sequences.

### 1. Experimental Materials

### 1) Test Samples:

[0633] Template-modified versions of unmodified sequences 1578s, 1835, and 1838, as well as sequences using template modification and anti-off-target design (Table 34).

### 2) Synthesis of Sequences:

### I. Template-Modified Sequences

[0634] The sequences were synthesized with reference to Example 1, under the section of “Synthesis of alternately modified sequence”.

II. siRNA Sequences with DNA-Based Anti-Off-Target Design

[0635] The siRNA sequences were synthesized with reference to Example 1. During the synthesis of the 6th or 7th nucleotide from the 5′ end of the antisense strand, the following DNA monomers were used: DMT-dA phosphoramidite monomer (Formula 15), DMT-dT phosphoramidite monomer (Formula 16), DMT-dC phosphoramidite monomer (Formula 17), and DMT-dG phosphoramidite monomer (Formula 18), the structures of which are as follows:

[chemical structure]

III. siRNA Sequences with GNA-Based Anti-Off-Target Design

[0636] The siRNA sequences were synthesized with reference to Example 1. During the synthesis of the 7th base from the 5′ end of the antisense strand, a GNA monomer was used, whose structure is as follows:

[chemical structure]

TABLE 34
Sequences using template modification and anti-off-target design

| | | Modified | | Modified |
|---|---|---|---|---|
| | | sequence | | sequence |
| | | SEQ ID NO./ | | SEQ ID NO./ |
| | | corres- | | corres- |
| | | ponding | | ponding |
| | | unmodified | | unmodified |
| Sequence | | sequence | | sequence |
| ID | Sense strand 5′-3′ | SEQ ID NO. | Antisense strand 5′-3′ | SEQ ID NO. |
| D835- | Ums-Ums-Gm-Gm-Gm- | 398/1 | UmsEVP-Afs-Cf-Uf-Um-Uf- | 433/14 |
| DV26P | Um-Uf-Um-Uf-Af-Af- | | Am-Am-Um-Um-Um-Um- | |
| | Am-Am-Um-Um-Am-Af- | | Am-Af-Am-Af-Cm-Cm-Cm- | |
| | Am-Gm-Um-Am | | Am-Ams-Ums-Um | |
| D835- | Ums-Ums-Gm-Gm-Gm- | 398/1 | UmsEVP-Afs-Cf-Uf-Um- | 564/14 |
| DV26P+ | Um-Uf-Um-Uf-Af-Af- | | Tgna-Am-Am-Um-Um-Um- | |
| | Am-Am-Um-Um-Am-Af- | | Um-Am-Af-Am-Af-Cm-Cm- | |
| | Am-Gm-Um-Am | | Cm-Am-Ams-Ums-Um | |
| D835- | Ums-Ums-Gm-Gm-Gm- | 526/1 | UmsEVP-Afs-Cf-Uf-Um-Uf- | 565/14 |
| DV26Pd7B | Um-Uf-Um-Uf-Af-Af- | | Ad-Am-Um-Um-Um-Um- | |
| | Am-Am-Um-Td-Am-Af- | | Am-Af-Am-Af-Cm-Cm-Cm- | |
| | Am-Gm-Um-Am | | Am-Ams-Ums-Um | |
| D835- | Ums-Ums-Gm-Gm-Gm- | 527/1 | UmsEVP-Afs-Cf-Uf-Um-Td- | 566/14 |
| DV26Pd67B | Um-Uf-Um-Uf-Af-Af- | | Ad-Am-Um-Um-Um-Um- | |
| | Am-Am-Um-Td-Ad-Af- | | Am-Af-Am-Af-Cm-Cm-Cm- | |
| | Am-Gm-Um-Am | | Am-Ams-Ums-Um | |
| D578s- | Ams-Cms-Cm-Um-Um- | 426/12 | UmsEVP-Afs-Cm-Uf-Cf- | 567/25 |
| DV29P+ | Uf-Um-Cf-Um-Uf-Cm- | | Agna-Um-Um-Am-Gm-Am- | |
| | Um-Am-Am-Um-Gf-Am- | | Am-Gm-Af-Am-Af-Am-Gm- | |
| | Gm-Um-Am | | Gm-Ums-Gms-Gm | |
| D578s- | Ams-Cms-Cm-Um-Um- | 528/12 | UmsEVP-Afs-Cm-Uf-Cf-Ad- | 568/25 |
| DV29Pd67B | Uf-Um-Cf-Um-Uf-Cm- | | Td-Um-Am-Gm-Am-Am- | |
| | Um-Am-Ad-Td-Gf-Am- | | Gm-Af-Am-Af-Am-Gm-Gm- | |
| | Gm-Um-Am | | Ums-Gms-Gm | |
| D578s- | Ams-Cms-Cm-Um-Um- | 529/12 | UmsEVP-Afs-Cm-Uf-Cf-Af- | 569/25 |
| DV29Pd7B | Uf-Um-Cf-Um-Uf-Cm- | | Td-Um-Am-Gm-Am-Am- | |
| | Um-Am-Ad-Um-Gf-Am- | | Gm-Af-Am-Af-Am-Gm-Gm- | |
| | Gm-Um-Am | | Ums-Gms-Gm | |
| D578s- | Ams-Cms-Cm-Um-Um- | 426/12 | UmsEVP-Afs-Cm-Uf-Cf-Af- | 492/25 |
| DV29P | Uf-Um-Cf-Um-Uf-Cm- | | Um-Um-Am-Gm-Am-Am- | |
| | Um-Am-Am-Um-Gf-Am- | | Gm-Af-Am-Af-Am-Gm-Gm- | |
| | Gm-Um-Am | | Ums-Gms-Gm | |

[0637] Cell type: HepG2 cells, provided by Cyagen (111-1701).
[0638] HepG2 cells were cultured in DMEM medium (ATCC-30-2003) containing 1000 fetal bovine serum (FBS, ExCell Bio-FSP500) and 1% penicillin-streptomycin (HyClone-SV30010).
[0639] Drug vehicle: sterile nuclease-free water, Gibco Opti-MEM.

### 2. Experimental Methods

[0640] The inhibitory effects of the test samples on the mRNA expression of AGT and potential off-target genes in HepG2 cell lines were tested by qRT-PCR.

### 2.1 Cell Culture

[0641] HepG2 cells in the logarithmic growth phase were harvested from subcultured stocks and cultured in DMEM medium containing 1% fetal bovine serum (supplemented with 100 μL/mL of penicillin and streptomycin). The cells were incubated in a cell culture incubator at 37° C. with 5% CO₂, with medium replaced daily. For subculture, the cells were digested with 0.25% trypsin, centrifuged at 1000 rpm for 5 minutes, and the supernatant was discarded. Fresh medium was added for subculture.

### 2.2 Cell Transfection

[0642] Preparation of transfection mixture: Lipofectamine RNAiMAX and Opti-MEM were mixed at a ratio of 2:98 and vortexed thoroughly.

[0643] Preparation of transfection reagent: 60 μL of siRNA solution diluted in Opti-MEM was mixed with 60 μL of the prepared transfection mixture at a ratio of 1:1 (v/v), vortexed thoroughly, and the mixture was incubated at room temperature for 15 minutes to obtain lipid nanoparticles (LNPs). A 12.5 μL aliquot was taken for encapsulation efficiency analysis.

[0644] Blank control transfection reagent: 60 μL of the prepared transfection mixture was added to 60 μL of Opti-MEM, vortexed thoroughly, and the mixture was incubated at room temperature for 15 minutes.

[0645] The prepared transfection reagent was added to a 24-well cell culture plate (100 μL per well), resulting in a final siRNA concentration of 16 pM/80 pM/400 pM/2 nM/10 nM per well. 500 μL of cell suspension (1.5×10⁵ cells per mL) was added per well. After mixing by crosswise method, the plate was incubated in a cell culture incubator at 37° C. with 5% CO₂ for 40 hours.

### 2.3 RNA Extraction and Reverse Transcription

[0646] After 24 hours of transfection, the medium was removed and the cells were collected for RNA extraction. Total RNA was extracted using the RNeasy® 96 Kit (QIAGEN-74182) according to the instructions provided by the manufacturer. Subsequently, cDNA was synthesized using the FastKing RT Kit (With gDNase) (TIANGEN-KR116-02) according to the instructions provided by the manufacturer.

### 2.4 RT-qPCR

[0647] Target cDNA was tested by qPCR, with GAPDH cDNA used as an internal control in parallel. 8 μL of prepared qPCR reaction mixture and 2 μL of sample cDNA were added to a 384-well plate. TaqMan qPCR was performed according to the following program: 95° C. for 10 minutes, followed by 40 cycles of 95° C. for 15 seconds and 60° C. for 1 minute. SYBR qPCR was performed according to the following program: 50° C. for 2 minutes, 95° C. for 10 minutes, followed by 40 cycles of 95° C. for 15 seconds and 60° C. for 1 minute; finally, a melting curve analysis was performed at 95° C. for 15 seconds, 60° C. for 1 minute, and 95° C. for 15 seconds.

### 2.5 Data Analysis

[0648] The RNA expression levels of target genes in samples were calculated based on Ct values using the ΔΔCt relative quantification method. The relative expression levels of target genes were expressed as 2^{-ΔΔCt}.

### The Calculation Formula is as Follows:

$$Δ Ct = Average Ct value of target gene - Average Ct value of reference gene ;$$

$$ΔΔ Ct = Δ Ct ( treatment group ) - Δ Ct ( RNAiMAX control group ) ;$$

$$Relative m R N A expression level of target gene = {2}^{- ΔΔ Ct} ;$$

$$Inhibition rate = ( 1 - relative expression level of sample / average expression level of RNAiMAX control ) \times 100 \% .$$

### 3. Experimental Results

(1) All modified sequences exhibited significant inhibitory effects on the AGT gene. For example, the template-modified sequence D578s-DV29P exhibited an inhibition rate of 85.7%, while the sequence D578s-DV29Pd7B with both template and anti-off-target modifications exhibited an inhibition rate of 81.3%.

[0649] The inhibition rates of all test samples on the AGT gene are listed in Table 35.

[0650] All template-modified sequences except D838-DV29P+ exhibited significant inhibitory effects on AGT at a concentration of 10 nM. For example, the template-modified sequence D578s-DV29P exhibited an inhibition rate of 85.7%.

TABLE 35
Inhibition rates of sequences with template and anti-
off-target modifications on AGT gene expression

| Unmodified | | Modification | Inhibition |
|---|---|---|---|
| sequence | Sequence ID | pattern | rate (%) |
| 1578s | D578s-DV29P | Template modification | 85.7 |
| | D578s-DV29P+ | Template | 78.2 |
| | | modification and | |
| | | GNA anti-off-target | |
| | D578s-DV29Pd67B | Template | 79.3 |
| | | modification and | |
| | | d67B anti-off-target | |
| | D578s-DV29Pd7B | Template | 81.3 |
| | | modification and | |
| | | d7B anti-off-target | |
| 1835 | D835-DV26P | Template modification | 89.2 |
| | D835-DV26P+ | Template | 84.4 |
| | | modification and | |
| | | GNA anti-off-target | |
| | D835-DV26Pd67B | Template | 85.4 |
| | | modification and | |
| | | d67B anti-off-target | |
| | D835-DV26Pd7B | Template | 84.6 |
| | | modification and | |
| | | d7B anti-off-target | |

[0651] After template modification and anti-off-target design, the sequence exhibited significant inhibitory activity on AGT gene expression. For example, when the unmodified sequence 1578s was modified with template DV29P, followed by anti-off-target design, the resulting sequence D578s-DV29Pd7B exhibited an inhibition rate of 81.3%.

(2) After using any one or more of the various modification patterns of the present disclosure, followed by anti-off-target design, the sequences exhibited significant anti-off-target effects on certain off-target genes, thereby reducing the inhibition of off-target genes.

[0652] As shown in Table 36, the experimental results demonstrated that:

[0653] The template-modified sequences of the present disclosure, when incorporating anti-off-target designs, reduced the inhibition of off-target genes, thereby exhibiting anti-off-target effects. The sequences using the modification templates of the present disclosure, when incorporating anti-off-target designs, exhibited anti-off-target effects, with a decrease of up to 72.535% in inhibition rate on off-target genes.

TABLE 36
Inhibition rates of template-modified sequences and their
anti-off-target modifications on off-target genes

| | | | | Decrease in |
|---|---|---|---|---|
| | | | | inhibition |
| | | | | rate |
| | | | Inhibition | compared to |
| | | Off- | rate on | no anti-off- |
| Unmodified | | target | off-target | target |
| sequence ID | Sequence ID | gene | gene (%) | design (%) |
| 1578s | D578s-DV29P | ERRFI1 | 66.894 | 0.000 |
| | D578s-DV29P+ | | 19.447 | 47.447 |
| | D578s-DV29Pd67B | | 12.678 | 54.216 |
| | D578s-DV29Pd7B | | −5.641 | 72.535 |
| 1835 | D835-DV26P | CCNA2 | 74.619 | 0.000 |
| | D835-DV26P+ | | 35.133 | 39.486 |
| | D835-DV26Pd67B | | 33.215 | 41.404 |
| | D835-DV26Pd7B | | 20.953 | 53.666 |

### 1) Template Modification Alone

[0654] Some template-modified sequences exhibited certain off-target effects. For example, the template-modified sequence D578s-DV29P (unmodified sequence 1578s modified with template DV29P) exhibited an inhibition rate of 66.894% against the potential off-target gene ERRFI1; the template-modified sequence D835-DV26P (unmodified sequence 1835 modified with template DV26P) exhibited an inhibition rate of 74.619% against the potential off-target gene CCNA2.

2) Simultaneous Anti-Off-Target Design (Denoted as “d67B” or “d7B” in Sequence ID)

[0655] Some of the sequences with both template and anti-off-target modifications demonstrated significantly reduced inhibition rates against off-target genes, thereby exhibiting significant anti-off-target effects. For example, D578s-DV25Pd7B exhibited a 72.535% reduction in inhibition rate against ERRFI1, indicating a significant decrease; D835-DV26Pd7B exhibited a 53.666% reduction in inhibition rate against CCNA2, indicating a significant decrease.

### SUMMARY

[0656] 1. All modified sequences exhibited significant inhibitory effects on the AGT gene. For example, the template-modified sequence D578s-DV29P exhibited an inhibition rate of 85.7%, while the sequence D578s-DV29Pd7B with both template and anti-off-target modifications exhibited an inhibition rate of 81.3%.
[0657] 2. After using any one or more of the various modification patterns of the present disclosure, followed by anti-off-target design, the sequences exhibited significant anti-off-target effects on certain off-target genes, thereby reducing the inhibition of off-target genes.
[0658] 1) Some template-modified sequences exhibited certain off-target effects. For example, the template-modified sequence D578s-DV29P (unmodified sequence 1578s modified with template DV29P) exhibited an inhibition rate of 66.894% against the potential off-target gene ERRFI1; the template-modified sequence D835-DV26P (unmodified sequence 1835 modified with template DV26P) exhibited an inhibition rate of 74.619% against the potential off-target gene CCNA2.
[0659] 2) The template-modified sequences of the present disclosure, when incorporating anti-off-target designs, reduced the inhibition of off-target genes, thereby exhibiting anti-off-target effects, with a decrease of up to 72.535% in inhibition rate on off-target genes.

### Example 8: Inhibition of Sequences Modified Using Modification Templates of the Present Disclosure on AGT in Primary Human Hepatocytes

[0660] In this example, the inhibitory effects of the high-activity sequences from Example 4 on potential off-target genes in primary human hepatocytes were examined, and compared with Zilebesiran, a drug currently in Phase II clinical trials. Five sequences, namely C1576s-DV29P, C1578s-DV29P, C1579-DV25P, C1812-DV25P, and C1585s-DV27P, were synthesized using their respective modification templates or both template and anti-off-target modifications, and conjugated with GalNAc to enable free uptake by hepatocytes. The sequences listed in Table 37 were applied to primary human hepatocytes at concentrations ranging from 0.0064 nM to 100 nM via free uptake. Dose-response curves were fitted, and the IC₅₀ values of these sequences were calculated. The results demonstrated that the IC₅₀ values of some sequences were superior to that of the positive control Zilebesiran. For example, D576s-DV29PG5 exhibited an IC₅₀ of 4.698 nM, outperforming that of the positive control Zilebesiran at 7.071 nM.

### 1. Experimental Materials

### 1) Test Samples:

[0661] The sequences listed in Table 37, which were synthesized using template modification alone or both template and anti-off-target modifications, and conjugated with GalNAc ligand G5 at the 3′ end of the sense strand:

[chemical structure]

[0662] The conjugation method of oligonucleotides with ligand G5 was the same as the preparation methods of conjugates 4, 5, 6, and 7 in Example 3 of Chinese Patent CN116854754A, i.e., conjugating YK-GAL-304, YK-GAL-305, YK-GAL-306, and YK-GAL-307 with oligonucleotides. YK-GAL-304, YK-GAL-305, YK-GAL-306, and YK-GAL-307 were synthesized as in Example 1 of CN116854754A.

[0663] The resulting oligonucleotide-ligand conjugate is shown below:

[chemical structure]

[0664] The specific sequences are listed in Table 7, where “G5” in the sequence ID indicates conjugation with GalNAc ligand G5, and “GL” indicates conjugation with GalNAc ligand L96.

TABLE 37
Template-modified sequences

| | | Modified | | Modified |
|---|---|---|---|---|
| | | sequence SEQ | | sequence SEQ |
| | | ID NO./ | | ID NO./ |
| | | corresponding | | corresponding |
| | | unmodified | | unmodified |
| | | sequence SEQ | Antisense | sequence SEQ |
| Sequence ID | Sense strand 5′-3′ | ID NO. | strand 5′-3′ | ID NO. |
| D579- | Cms-Cms-Um-Um-Um- | 530/4 | UmsEVP-Cfs-Gm-Am-Cm- | 457/17 |
| DV25PG5 | Um-Cf-Um-Uf-Cf-Uf-Am- | | Uf-Cm-Am-Um-Um-Am- | |
| | Am-Um-Gm-Am-Gf-Um- | | Gm-Am-Af-Gm-Af-Am- | |
| | Cm-Gm-Am-G5 | | Am-Am-Gm-Gms-Ums-Gm | |
| D579- | Cms-Cms-Um-Um-Um- | 531/4 | UmsEVP-Cfs-Gm-Am-Cm- | 570/17 |
| DV25Pd7BG5 | Um-Cf-Um-Uf-Cf-Uf-Am- | | Uf-Cd-Am-Um-Um-Am- | |
| | Am-Um-Gd-Am-Gf-Um- | | Gm-Am-Af-Gm-Af-Am- | |
| | Cm-Gm-Am-G5 | | Am-Am-Gm-Gms-Ums-Gm | |
| D579- | Cms-Cms-Um-Um-Um- | 532/4 | UmsEVP-Cfs-Gm-Am-Cm- | 571/17 |
| DV25Pd67BG5 | Um-Cf-Um-Uf-Cf-Uf-Am- | | Td-Cd-Am-Um-Um-Am- | |
| | Am-Um-Gd-Ad-Gf-Um- | | Gm-Am-Af-Gm-Af-Am- | |
| | Cm-Gm-Am-G5 | | Am-Am-Gm-Gms-Ums-Gm | |
| D812- | Cms-Cms-Um-Um-Um- | 541/3 | UmsEVP-Ufs-Um-Gm-Um- | 450/16 |
| DV25PG5 | Um-Cf-Am-Af-Gf-Uf-Um- | | Uf-Cm-Um-Cm-Am-Am- | |
| | Gm-Am-Gm-Am-Af-Cm- | | Cm-Um-Uf-Gm-Af-Am-Am- | |
| | Am-Am-Am-G5 | | Am-Gm-Gms-Gms-Am | |
| D576s- | Cms-Cms-Am-Cm-Cm- | 554/11 | UmsEVP-Ufs-Cm-Af-Uf-Uf- | 488/24 |
| DV29PG5 | Uf-Um-Uf-Um-Cf-Um- | | Am-Gm-Am-Am-Gm-Am- | |
| | Um-Cm-Um-Am-Af-Um- | | Am-Af-Am-Gf-Gm-Um- | |
| | Gm-Am-Am-G5 | | Gm-Gms-Gms-Am | |
| D578s- | Ams-Cms-Cm-Um-Um- | 558/12 | UmsEVP-Afs-Cm-Uf-Cf-Af- | 569/25 |
| DV29Pd7BG5 | Uf-Um-Cf-Um-Uf-Cm- | | Td-Um-Am-Gm-Am-Am- | |
| | Um-Am-Ad-Um-Gf-Am- | | Gm-Af-Am-Af-Am-Gm- | |
| | Gm-Um-Am-G5 | | Gm-Ums-Gms-Gm | |
| D585s- | Cms-Ums-Um-Cm-Um- | 560/10 | UmsEVP-Afs-Am-Af-Gf-Uf- | 483/23 |
| DV27PG5 | Af-Am-Uf-Gf-Af-Gm- | | Cm-Gm-Am-Cm-Um-Cm- | |
| | Um-Cm-Gm-Am-Cf-Um- | | Am-Uf-Um-Af-Gm-Am- | |
| | Um-Um-Am-G5 | | Am-Gms-Ams-Am | |
| Zilebesiran | Gms-Ums-Cm-Am-Um- | 561/507 | Ums-Gfs-Um-Am-Cm-Tgna- | 587/520 |
| | Cm-Cf-Am-Cf-Af-Af-Um- | | Cm-Um-Cm-Am-Um-Um- | |
| | Gm-Am-Gm-Am-Gm-Um- | | Gm-Uf-Gm-Gf-Am-Um- | |
| | Am-Cm-Am-GL | | Gm-Am-Cms-Gms-Am | |

[0665] Cell type: primary human hepatocytes, provided by Liver Biotechnology Co., Ltd. (LV-PHH1001).

[0666] Drug vehicle: sterile nuclease-free water, primary human hepatocyte maintenance medium (LV-WEM001).

### 2. Experimental Methods

[0667] The inhibitory effects of the test samples on the mRNA expression of AGT genes in primary human hepatocytes were tested by qRT-PCR.

### 2.1 Thawing and Culturing of Primary Human Hepatocytes

[0668] The medium was pre-warmed at a constant temperature of 37° C. for at least 30 minutes. 300 μL of PBS was added per well in a collagen-coated 24-well plate, which was shaken several times, and the PBS was aspirated. The cryovial containing the hepatocytes was removed from liquid nitrogen storage and placed in a 37° C. water bath, gently shaken until only a small amount of ice crystals remained in the vial, and the cell suspension was poured into thawing medium at once. 1 mL of thawing medium was pipetted to rinse the inner wall of the cryovial 2 to 3 times. The cell suspension in thawing medium was mixed by inversion, followed by centrifugation at 50 g for 5 minutes at room temperature, with acceleration set to 5 and deceleration set to 3. The cells were diluted to 3×10⁵ cells/mL in plating medium, then inoculated into a 24-well plate at 0.5 mL per well, and incubated in an incubator for 24 hours.

### 2.2 Free Uptake by Primary Human Hepatocytes

[0669] The test samples were diluted to 100 to 0.0064 nM in primary human hepatocyte maintenance medium. After incubation, the primary human hepatocytes were removed, the plating medium was aspirated, and 500 μL of the diluted test sample was added per well. The plate was returned to the cell culture incubator at 37° C. with 5% CO₂ and incubated for an additional 40 hours.

### 2.3 RNA Extraction and Reverse Transcription

[0670] After 24 hours of transfection, the medium was removed and the cells were collected for RNA extraction. Total RNA was extracted using the RNeasy® 96 Kit (QIAGEN-74182) according to the instructions provided by the manufacturer. Subsequently, cDNA was synthesized using the FastKing RT Kit (With gDNase) (TIANGEN-KR116-02) according to the instructions provided by the manufacturer.

### 2.4 RT-qPCR

[0671] Refer to “Quantitative analysis of AGT mRNA” under Section 2.3 in Example 2.

### 2.5 Data Analysis

[0672] The RNA expression levels of target genes in samples were calculated based on Ct values using the ΔΔCt relative quantification method. The relative expression levels of target genes were expressed as 2^{-ΔΔCt}.

### The Calculation Formula is as Follows:

$$Δ Ct = Average Ct value of target gene - Average Ct value of reference gene ;$$

$$ΔΔ Ct = Δ Ct ( treatment group ) - Δ Ct ( RNAiMAX control group ) ;$$

$$Relative m R N A expression level of target gene = {2}^{- ΔΔ Ct} ;$$

$$Inhibition rate = ( 1 - relative expression level of sample / average expression level of RNAiMAX control ) \times 100 \% .$$

### 3. Experimental Results

[0673] The inhibition rates of these sequence against AGT at various concentrations are shown in Table 38 below. All sequences exhibited significant inhibitory effects against AGT. For example, D576s-DV29PG5 exhibited an inhibition rate of 83.1% against AGT at 100 nM. In addition, the IC₅₀ values of some sequences were superior to that of the positive control Zilebesiran. For example, D576s-DV29PG5 exhibited an IC₅₀ of 4.698 nM, outperforming that of the positive control Zilebesiran at 7.071 nM.

TABLE 38
Inhibition rates and IC₅₀ values of sequences
against AGT at various concentrations

| | AGT inhibition rate (%) | | | | | | | |
|---|---|---|---|---|---|---|---|---|
| | 100 | 20 | 4 | 0.8 | 0.16 | 0.032 | 0.0064 | IC₅₀ |
| Sequence name | nM | nM | nM | nM | nM | nM | nM | (nM) |
| Zilebesiran | 65.5 | 57.8 | 42.8 | 22.6 | 9.9 | 5.2 | 14.9 | 7.071 |
| D579-DV25Pd7BG5 | 71.7 | 58.8 | 63.2 | 12.7 | 2.1 | −5.5 | −6.2 | 1.998 |
| D576s-DV29PG5 | 83.1 | 66.8 | 46.4 | −0.5 | 3.0 | −1.2 | −2.8 | 4.698 |
| D812-DV25PG5 | 74.4 | 63.3 | 45.4 | 10.9 | 7.8 | 1.4 | 1.1 | 5.659 |
| D578s-DV29Pd7BG5 | 61.5 | 43.0 | 17.3 | −7.7 | −12.5 | −27.5 | −13.0 | 30.720 |
| D585s-DV27PG5 | 56.9 | 47.5 | 33.9 | 13.5 | −3.8 | −8.7 | 2.5 | 20.470 |
| D579-DV25Pd67BG5 | 76.1 | 73.3 | 42.0 | 19.9 | 24.4 | 2.3 | −12.2 | 5.719 |
| D579-DV25PG5 | 72.6 | 60.2 | 32.9 | 12.5 | −0.9 | 6.3 | 8.6 | 9.818 |

### Example 9: Inhibition of Sequences Modified Using Modification Templates of the Present Disclosure on AGT in Mouse Serum

[0674] In this example, certain sequences were exemplarily selected, including unmodified sequences 1576s, 1578s, 1579, 1585s, 1789, 1791, 1795, 1812, 1816, 1835, 1838, and 1839, which were then modified, e.g., using template modification alone or both template and anti-off-target modifications. The positive control drug used in this study was Zilebesiran, an siRNA drug currently in Phase II clinical trials. The inhibitory effects of these sequences on AGT in serum at different time points were tested by ELISA using transgenic mice expressing the human AGT gene.

### 1. Experimental Materials

### Test Articles:

[0675] The sequences listed in Table 39, which were synthesized using template modification alone or both template and anti-off-target modifications, and conjugated with GalNAc ligand G5 at the 3′ end of the sense strand:

[chemical structure]

[0676] The conjugation method of oligonucleotides with ligand G5 was the same as the preparation methods of conjugates 4, 5, 6, and 7 in Example 3 of Chinese Patent CN116854754A, i.e., conjugating YK-GAL-304, YK-GAL-305, YK-GAL-306, and YK-GAL-307 with oligonucleotides. YK-GAL-304, YK-GAL-305, YK-GAL-306, and YK-GAL-307 were synthesized as in Example 1 of CN116854754A.

### The Resulting Oligonucleotide-Ligand Conjugate is Shown Below:

[chemical structure]

[0677] The specific sequences are listed in Table 39, where “G5” in the sequence ID indicates conjugation with GalNAc ligand G5, and “GL” indicates conjugation with GalNAc ligand L96.

### The Structure of G5 is as Follows:

[chemical structure]

[0678] [[(1R,2R,3R,4R)-1-[[28-[[2-(acetylamino)-2-deoxy-β-D-galactopyranosyl]oxy]-13,13-bis[[3-[[3-[[5-[[2-(acetylamino)-2-deoxy-β-D-galactopyranosyl]oxy]-1-oxopentyl]amino]propyl]amino]-3-oxopropoxy]methyl]-11,18,24-trioxo-15-oxa-12,19,23-triazaoctacosan-1-yl]oxy]-2-O-methyl-5-β-D-ribofuranosyl]hydrogen phosphate]
[0679] [[(1R,2R,3R,4R)-1-[[28-[[2-(acetylamino)-2-deoxy-β-D-galactopyranosyl]oxy]-13,13-bis[[3-[[3-[[5-[[2-(acetylamino)-2-deoxy-β-D-galactopyranosyl]oxy]-1-oxopentyl]amino]propyl]amino]-3-oxopropoxy]methyl]-11,18,24-trioxo-15-oxa-12,19,23-triazaoctacosan-1-yl]oxy]-2-O-methyl-5-β-D-ribofuranosyl]hydrogen phosphate]

### The Structure of GL is as Follows:

[chemical structure]

[0680] [(2S,4R)-1-[29-[[2-(acetylamino)-2-deoxy-β-D-galactopyranosyl]oxy]-14,14-bis[[3-[[3-[[5-[[2-(acetylamino)-2-deoxy-β-D-galactopyranosyl]oxy]-1-oxopentyl]amino]propyl]amino]-3-oxopropoxy]methyl]-1,12,19,25-tetraoxo-16-oxa-13,20,24-triazanonacos-1-yl]-4-hydroxy-2-pyrrolidinyl]methyl hydrogen phosphate]
[0681] [(2S,4R)-1-[29-[[2-(acetylamino)-2-deoxy-β-D-galactopyranosyl]oxy]-14,14-bis[[3-[[3-[[5-[[2-(acetylamino)-2-deoxy-β-D-galactopyranosyl]oxy]-1-oxopentyl]amino]propyl]amino]-3-oxopropoxy]methyl]-1,12,19,25-tetraoxo-16-oxa-13,20,24-triazanonacos-1-yl]-4-hydroxy-2-pyrrolidinyl]methyl hydrogen phosphate]

TABLE 39
Sequences in animal experiments

| | | Modified | | Modified |
|---|---|---|---|---|
| | | sequence SEQ | | sequence SEQ |
| | | ID NO./ | | ID NO./ |
| | | corresponding | | corresponding |
| | | unmodified | | unmodified |
| | | sequence SEQ | | sequence SEQ |
| Sequence ID | Sense strand 5′-3′ | ID NO. | Antisense strand 5′-3′ | ID NO. |
| D579-DV25PG5 | Cms-Cms-Um-Um-Um- | 530/4 | UmsEVP-Cfs-Gm-Am-Cm- | 457/17 |
| | Um-Cf-Um-Uf-Cf-Uf- | | Uf-Cm-Am-Um-Um-Am- | |
| | Am-Am-Um-Gm-Am-Gf- | | Gm-Am-Af-Gm-Af-Am- | |
| | Um-Cm-Gm-Am-G5 | | Am-Am-Gm-Gms-Ums-Gm | |
| D579- | Cms-Cms-Um-Um-Um- | 531/4 | UmsEVP-Cfs-Gm-Am-Cm- | 570/17 |
| DV25Pd7BG5 | Um-Cf-Um-Uf-Cf-Uf- | | Uf-Cd-Am-Um-Um-Am- | |
| | Am-Am-Um-Gd-Am-Gf- | | Gm-Am-Af-Gm-Af-Am- | |
| | Um-Cm-Gm-Am-G5 | | Am-Am-Gm-Gms-Ums-Gm | |
| D789-DV26PG5 | Gms-Ums-Um-Um-Gm- | 533/6 | AmsEVP-Cfs-Af-Cf-Um- | 465/19 |
| | Um-Gf-Am-Af-Af-Cf- | | Uf-Um-Um-Um-Um-Gm- | |
| | Am-Am-Am-Am-Am-Af- | | Um-Um-Uf-Cm-Af-Cm- | |
| | Gm-Um-Gm-Um-G5 | | Am-Am-Am-Cms-Ams-Am | |
| D789-DV25PG5 | Gms-Ums-Um-Um-Gm- | 533/6 | AmsEVP-Cfs-Am-Cm-Um- | 468/19 |
| | Um-Gf-Am-Af-Af-Cf- | | Uf-Um-Um-Um-Um-Gm- | |
| | Am-Am-Am-Am-Am-Af- | | Um-Um-Uf-Cm-Af-Cm- | |
| | Gm-Um-Gm-Um-G5 | | Am-Am-Am-Cms-Ams-Am | |
| D789- | Gms-Ums-Um-Um-Gm- | 534/6 | AmsEVP-Cfs-Af-Cf-Um- | 572/19 |
| DV26Pd7BG5 | Um-Gf-Am-Af-Af-Cf- | | Uf-Td-Um-Um-Um-Gm- | |
| | Am-Am-Am-Ad-Am-Af- | | Um-Um-Uf-Cm-Af-Cm- | |
| | Gm-Um-Gm-Um-G5 | | Am-Am-Am-Cms-Ams-Am | |
| D789- | Gms-Ums-Um-Um-Gm- | 534/6 | AmsEVP-Cfs-Am-Cm-Um- | 573/19 |
| DV25Pd7BG5 | Um-Gf-Am-Af-Af-Cf- | | Uf-Td-Um-Um-Um-Gm- | |
| | Am-Am-Am-Ad-Am-Af- | | Um-Um-Uf-Cm-Af-Cm- | |
| | Gm-Um-Gm-Um-G5 | | Am-Am-Am-Cms-Ams-Am | |
| D791-DV26PG5 | Ums-Ums-Gm-Um-Gm- | 536/8 | UmsEVP-Afs-Af-Cf-Am- | 476/21 |
| | Am-Af-Am-Cf-Af-Af- | | Cf-Um-Um-Um-Um-Um- | |
| | Am-Am-Am-Am-Gm-Uf- | | Um-Gm-Uf-Um-Uf-Cm- | |
| | Gm-Um-Um-Am-G5 | | Am-Cm-Am-Ams-Ams-Cm | |
| D791- | Ums-Ums-Gm-Um-Gm- | 537/8 | UmsEVP-Afs-Af-Cf-Am- | 576/21 |
| DV26Pd7BG5 | Am-Af-Am-Cf-Af-Af- | | Cf-Td-Um-Um-Um-Um- | |
| | Am-Am-Am-Ad-Gm-Uf- | | Um-Gm-Uf-Um-Uf-Cm- | |
| | Gm-Um-Um-Am-G5 | | Am-Cm-Am-Ams-Ams-Cm | |
| D795-DV27PG5 | Gms-Ams-Am-Am-Cm- | 539/9 | AmsEVP-Afs-Gm-Gf-Gf- | 479/22 |
| | Am-Af-Am-Af-Af-Af- | | Af-Am-Cm-Am-Cm-Um- | |
| | Gm-Um-Gm-Um-Um-Cf- | | Um-Um-Uf-Um-Uf-Gm- | |
| | Cm-Cm-Um-Um-G5 | | Um-Um-Um-Cms-Ams-Cm | |
| D812-DV25PG5 | Cms-Cms-Um-Um-Um- | 541/3 | UmsEVP-Ufs-Um-Gm-Um- | 450/16 |
| | Um-Cf-Am-Af-Gf-Uf- | | Uf-Cm-Um-Cm-Am-Am- | |
| | Um-Gm-Am-Gm-Am-Af- | | Cm-Um-Uf-Gm-Af-Am- | |
| | Cm-Am-Am-Am-G5 | | Am-Am-Gm-Gms-Gms-Am | |
| D816-DV25PG5 | Ums-Ums-Cm-Am-Am- | 543/2 | AmsEVP-Afs-Um-Um-Um- | 443/15 |
| | Gm-Uf-Um-Gf-Af-Gf- | | Uf-Um-Gm-Um-Um-Cm- | |
| | Am-Am-Cm-Am-Am-Af- | | Um-Cm-Af-Am-Cf-Um- | |
| | Am-Am-Um-Um-G5 | | Um-Gm-Am-Ams-Ams-Am | |
| D835-DV26PG5 | Ums-Ums-Gm-Gm-Gm- | 545/1 | UmsEVP-Afs-Cf-Uf-Um- | 433/14 |
| | Um-Uf-Um-Uf-Af-Af- | | Uf-Am-Am-Um-Um-Um- | |
| | Am-Am-Um-Um-Am-Af- | | Um-Am-Af-Am-Af-Cm- | |
| | Am-Gm-Um-Am-G5 | | Cm-Cm-Am-Ams-Ums-Um | |
| D835- | Ums-Ums-Gm-Gm-Gm- | 546/1 | UmsEVP-Afs-Cf-Uf-Um- | 565/14 |
| DV26Pd7BG5 | Um-Uf-Um-Uf-Af-Af- | | Uf-Ad-Am-Um-Um-Um- | |
| | Am-Am-Um-Td-Am-Af- | | Um-Am-Af-Am-Af-Cm- | |
| | Am-Gm-Um-Am-G5 | | Cm-Cm-Am-Ams-Ums-Um | |
| D838-DV29PG5 | Gms-Gms-Um-Um-Um- | 548/13 | UmsEVP-Ufs-Am-Uf-Af- | 496/26 |
| | Um-Af-Am-Af-Am-Uf- | | Cf-Um-Um-Um-Am-Am- | |
| | Um-Am-Am-Am-Gm-Uf- | | Um-Um-Uf-Um-Af-Am- | |
| | Am-Um-Am-Am-G5 | | Am-Am-Cm-Cms-Cms-Am | |
| D838- | Gms-Gms-Um-Um-Um- | 549/13 | UmsEVP-Ufs-Am-Uf-Af- | 581/26 |
| DV29Pd7BG5 | Um-Af-Am-Af-Am-Uf- | | Cf-Td-Um-Um-Am-Am- | |
| | Um-Am-Am-Ad-Gm-Uf- | | Um-Um-Uf-Um-Af-Am- | |
| | Am-Um-Am-Am-G5 | | Am-Am-Cm-Cms-Cms-Am | |
| D839-DV29PG5 | Gms-Ums-Um-Um-Um- | 551/7 | UmsEVP-Gfs-Um-Af-Uf- | 471/20 |
| | Am-Af-Am-Af-Um-Uf- | | Af-Cm-Um-Um-Um-Am- | |
| | Am-Am-Am-Gm-Um-Af- | | Am-Um-Uf-Um-Uf-Am- | |
| | Um-Am-Cm-Am-G5 | | Am-Am-Am-Cms-Cms-Cm | |
| D839- | Gms-Ums-Um-Um-Um- | 552/7 | UmsEVP-Gfs-Um-Af-Uf- | 583/20 |
| DV29Pd7BG5 | Am-Af-Am-Af-Um-Uf- | | Af-Cd-Um-Um-Um-Am- | |
| | Am-Am-Am-Gd-Um-Af- | | Am-Um-Uf-Um-Uf-Am- | |
| | Um-Am-Cm-Am-G5 | | Am-Am-Am-Cms-Cms-Cm | |
| D576s-DV29PG5 | Cms-Cms-Am-Cm-Cm- | 554/11 | UmsEVP-Ufs-Cm-Af-Uf- | 488/24 |
| | Uf-Um-Uf-Um-Cf-Um- | | Uf-Am-Gm-Am-Am-Gm- | |
| | Um-Cm-Um-Am-Af-Um- | | Am-Am-Af-Am-Gf-Gm- | |
| | Gm-Am-Am-G5 | | Um-Gm-Gms-Gms-Am | |
| D576s- | Cms-Cms-Am-Cm-Cm- | 555/11 | UmsEVP-Ufs-Cm-Af-Uf- | 585/24 |
| DV29Pd7BG5 | Uf-Um-Uf-Um-Cf-Um- | | Uf-Ad-Gm-Am-Am-Gm- | |
| | Um-Cm-Td-Am-Af-Um- | | Am-Am-Af-Am-Gf-Gm- | |
| | Gm-Am-Am-G5 | | Um-Gm-Gms-Gms-Am | |
| D578s-DV29PG5 | Ams-Cms-Cm-Um-Um- | 557/12 | UmsEVP-Afs-Cm-Uf-Cf- | 492/25 |
| | Uf-Um-Cf-Um-Uf-Cm- | | Af-Um-Um-Am-Gm-Am- | |
| | Um-Am-Am-Um-Gf-Am- | | Am-Gm-Af-Am-Af-Am- | |
| | Gm-Um-Am-G5 | | Gm-Gm-Ums-Gms-Gm | |
| D578s- | Ams-Cms-Cm-Um-Um- | 558/12 | UmsEVP-Afs-Cm-Uf-Cf- | 569/25 |
| DV29Pd7BG5 | Uf-Um-Cf-Um-Uf-Cm- | | Af-Td-Um-Am-Gm-Am- | |
| | Um-Am-Ad-Um-Gf-Am- | | Am-Gm-Af-Am-Af-Am- | |
| | Gm-Um-Am-G5 | | Gm-Gm-Ums-Gms-Gm | |
| D585s-DV27PG5 | Cms-Ums-Um-Cm-Um- | 560/10 | UmsEVP-Afs-Am-Af-Gf- | 483/23 |
| | Af-Am-Uf-Gf-Af-Gm- | | Uf-Cm-Gm-Am-Cm-Um- | |
| | Um-Cm-Gm-Am-Cf-Um- | | Cm-Am-Uf-Um-Af-Gm- | |
| | Um-Um-Am-G5 | | Am-Am-Gms-Ams-Am | |
| Zilebesiran | Gms-Ums-Cm-Am-Um- | 561/507 | Ums-Gfs-Um-Am-Cm- | 587/520 |
| | Cm-Cf-Am-Cf-Af-Af- | | Tgna-Cm-Um-Cm-Am-Um- | |
| | Um-Gm-Am-Gm-Am- | | Um-Gm-Uf-Gm-Gf-Am- | |
| | Gm-Um-Am-Cm-Am-GL | | Um-Gm-Am-Cms-Gms-Am | |
| DNC-DV29PG5 | Gms-Ums-Gm-Am-Am- | 562/NA | UmsEVP-Afs-Gm-Af-Gf- | 588/NA |
| | Am-Cf-Am-Af-Cm-Uf- | | Gf-Um-Gm-Cm-Am-Cm- | |
| | Am-Gm-Um-Gm-Cm-Af- | | Um-Am-Gf-Um-Uf-Gm- | |
| | Cm-Cm-Um-Cm-G5 | | Um-Um-Um-Cms-Ams-Cm | |

### Preparation of Test Articles:

[0682] Drug vehicle: Saline
[0683] Preparation conditions: Aseptic environment
[0684] Labeling method: Each prepared dosing formulation was labeled with tags, with the outer packaging indicating the study number, name, concentration, quantity, preparation date, preparer, and storage conditions.
[0685] Storage conditions: Prepared immediately before use; remaining samples were stored at −80° C.

### Information on Experimental Animals:

[0686] Species/Strain: hAGT transgenic mice
[0687] Grade: SPF
[0688] Sex: Male
[0689] Quantity: 150
[0690] Age: 6 to 8 weeks
[0691] Weight: 18 to 28 g
[0692] Source: Jiangsu GemPharmatech Co., Ltd.
[0693] Production license No.: SCXK (Su) 2018-0008

### Review by Institutional Animal Care and Use Committee (IACUC):

[0694] After reception, the experimental animals were housed at Beijing BrightShines Technology Co., Ltd. under a project license No.: SYXK (Jing) 2022-0025. The project has been reviewed and approved by the IACUC of Beijing BrightShines Technology Co., Ltd. The experimental procedures were strictly conducted in compliance with IACUC requirements to ensure animal welfare.

### Housing and Management:

[0695] Housing conditions: After reception, the experimental animals were housed at Beijing BrightShines Technology Co., Ltd. under a project license No.: SYXK (Jing) 2022-0025. They were housed in rearing cages with dimensions of 29.0 cm (L)×18.5 cm (W)×13.0 cm (H). The environmental parameters were set as follows: a temperature ranging from 20° C. to 26° C., a humidity ranging from 40% to 70%, a ventilation rate of at least 15 fresh air changes per hour, and a 12-hour light/12-hour dark cycle with artificial lighting.

[0696] The environmental conditions complied with the National Standard GB14925-2010 of the People's Republic of China, with environmental control provided by a modular air-conditioning system.

[0697] The animals had free access to food and water. Water bottles and drinking water in the bottles were replaced at least twice weekly. Used water bottles were sterilized in a pulse vacuum autoclave before reuse.

[0698] The cages and bedding were replaced at least once weekly. All cages and bedding were sterilized in a pulse vacuum autoclave before being introduced into a barrier environment. Cage racks were cleaned and disinfected at least once weekly.

[0699] Animal observation rooms were cleaned and disinfected daily, including shelves, floors, work surfaces, etc.

[0700] Disinfectants used in the barrier environment included: 6.67% benzalkonium bromide solution, 0.5% 84 disinfectant, 75% ethanol, and 0.08% didecyldimethylammonium bromide. These four disinfectants should be used alternately and should not be used in combination.

[0701] Animal feed: SPF rodent maintenance feed: produced by SPF (Beijing) Biotechnology Co., Ltd.; production license No.: SCXK (Jing) 2019-0010, issued by the Beijing Municipal Science and Technology Commission.

[0702] Feed testing: Each batch of feed had a quality certificate. Microbial testing was conducted quarterly by the company. A recent third-party feed inspection report was provided semiannually by the supplier. Nutrient composition testing complied with the National Standard GB14924.3-2010 of the People's Republic of China, while contaminant testing complied with the National Standard GB14924.2-2001 of the People's Republic of China.

[0703] Animal drinking water: Drinking water: sterile water prepared by a filtration system, directly filled into drinking bottles.

[0704] Drinking water testing: Microbial testing was conducted quarterly by the company. Water quality testing was conducted annually by a third-party testing agency. Drinking water testing complied with the National Standard GB5749-2006 of the People's Republic of China.

[0705] Animal bedding: Corncob bedding: produced by SPF (Beijing) Biotechnology Co., Ltd.; production license No.: SCXK (Jing) 2019-0004, issued by the Beijing Municipal Science and Technology Commission.

[0706] Bedding testing: Microbial testing was conducted quarterly by the company. At least one recent third-party bedding inspection report was provided semiannually by the supplier. Bedding testing complied with the National Standard GB14924.2-2001 of the People's Republic of China.

### 2. Experimental Methods

### Dose Design and Grouping

[0707] Definition of test date: The day on which the animals were administered with the vehicle or test article was defined as Day 0.

[0708] Grouping and dosing: After 3 days of acclimation, the experimental animals were randomly divided into a negative control group and a test article group based on AGT protein levels in serum, with 6 animals per group. A single subcutaneous injection was administered at a dose of 3 mg/kg, with a volume of 5 mL/kg and a concentration of 0.6 mg/mL. The day of dosing was recorded as Day 0.

[0709] Individual animals were identified by ear tags. Cages were identified by hanging cage cards. A laboratory signage was hung at the entrance of the laboratory. Grouping information is detailed in Table 40 below:

TABLE 40
Grouping information

| | | | Mode/ | | Number |
|---|---|---|---|---|---|
| | | Dose | frequency of | Period | of |
| Group | Drug | (mg/kg) | administration | (days) | animals |
| Negative | Vehicle | / | / | 56 | 6 |
| control group | | | | | |
| Test | siRNA | 3 | s.c./once | 56 | 6 |
| article group | | | | | |

### Measurement Indicators

### (1) General Observation

[0710] Observations were conducted once daily from one week prior to dosing until the end of the experiment.

[0711] Observation items: cage-side observations for mortality or moribund state, mental status, behavioral activities, fecal characteristics, supply of feed and water, etc.

[0712] Test animals: all animals in both the negative control and test article groups.

### (2) Expression of AGT Protein in Serum

[0713] Time points for measurement: Day −3 (prior to dosing), Day 7 (1 week post-dosing), Day 14 (2 weeks post-dosing), Day 21 (3 weeks post-dosing), Day 28 (4 weeks post-dosing), and Day 35 (5 weeks post-dosing).

[0714] Method for AGT protein level measurement: measured using an ELISA kit; repeated freeze-thaw cycles of serum samples were avoided.

[0715] Test animals: all animals in both the negative control and test article groups.

### (3) Data Processing and Statistical Analysis

[0716] Experimental data were expressed as mean±standard deviation (Mean±SD), and data analysis was performed using GraphPad Prism 8.3 software. Statistical analysis was conducted using two-way ANOVA and post hoc tests, with LSD test for homogeneity of variance and Dunnett T3 test for heterogeneity of variance. P<0.05 was considered statistically significant.

### 3. Experimental Results

[0717] The specific experimental results are shown in Table 41.

[0718] It can be seen that these sequences can continuously and significantly inhibit the expression of AGT protein in serum. For example, D576s-DV29PG5 exhibited inhibition rates of 84.09%, 82.11%, and 85.25% on Day 7, Day 14, and Day 28, respectively.

(1) The sequences of the present disclosure, such as unmodified sequences 1579, 1789, 1812, 1576s, 1578s, and 1585s with different modifications, exhibited significant inhibitory effects on the expression of AGT protein in serum. For example, D576s-DV29PG5 exhibited inhibition rates of 84.09%, 82.11%, and 85.25% on Day 7, Day 14, and Day 21, respectively (FIG. 8).

TABLE 41
Inhibition rates of different sequences on AGT protein in serum

| | | Inhibition rate (%) | | | | | | | |
|---|---|---|---|---|---|---|---|---|---|
| Unmodified | | Day | Day | Day | Day | Day | Day | Day | Day |
| sequence ID | Sequence ID | 7 | 14 | 21 | 28 | 35 | 42 | 49 | 56 |
| | Saline | −12.05 | −4.17 | −14.50 | −17.18 | −6.21 | −5.65 | −13.98 | −8.02 |
| | DNC-DV29PG5 | 4.14 | −17.92 | 9.78 | 3.04 | | | | |
| | Zilebesiran | 72.52 | 67.96 | 74.49 | 70.53 | 57.13 | 55.50 | 40.41 | 29.90 |
| 1576s | D576s-DV29Pd7BG5 | 75.91 | 61.16 | 54.05 | 32.94 | | | | |
| 1576s | D576s-DV29PG5 | 84.09 | 82.11 | 85.25 | 84.61 | 83.67 | 82.63 | 76.08 | 74.43 |
| 1578s | D578s-DV29Pd7BG5 | 81.76 | 80.52 | 83.37 | 80.74 | 75.71 | 75.38 | 67.58 | 59.76 |
| 1578s | D578s-DV29PG5 | 84.16 | 81.73 | 85.02 | 83.70 | | | | |
| 1579 | D579-DV25PG5 | 80.18 | 82.30 | 80.62 | 78.42 | 78.42 | 79.22 | 74.17 | 70.95 |
| 1579 | D579-DV25Pd7BG5 | 82.45 | 83.37 | 81.28 | 80.19 | 76.74 | 76.95 | 69.05 | 64.51 |
| 1585s | D585s-DV27PG5 | 80.37 | 76.55 | 77.88 | 75.02 | 65.47 | 60.63 | 41.16 | 29.04 |
| 1789 | D789-DV25Pd7BG5 | 63.75 | 64.84 | 51.52 | 40.12 | | | | |
| 1789 | D789-DV26Pd7BG5 | 72.49 | 70.00 | 55.31 | 42.63 | | | | |
| 1789 | D789-DV25PG5 | 69.90 | 73.61 | 69.45 | 61.94 | | | | |
| 1789 | D789-DV26PG5 | 74.52 | 77.51 | 72.40 | 68.56 | 63.15 | 60.50 | 47.62 | 37.35 |
| 1791 | D791-DV26Pd7BG5 | 74.54 | 70.80 | 62.16 | 49.77 | | | | |
| 1791 | D791-DV26PG5 | 73.28 | 73.36 | 66.01 | 59.54 | | | | |
| 1795 | D795-DV27PG5 | 60.21 | 60.31 | 62.70 | 55.58 | | | | |
| 1812 | D812-DV25PG5 | 81.87 | 81.67 | 82.22 | 82.83 | 81.77 | 81.17 | 76.58 | 72.98 |
| 1816 | D816-DV25PG5 | 73.58 | 72.79 | 63.17 | 60.38 | | | | |
| 1835 | D835-DV26Pd7BG5 | 52.91 | 35.34 | 18.61 | 25.60 | | | | |
| 1835 | D835-DV26PG5 | 65.38 | 63.25 | 59.95 | 59.09 | | | | |
| 1838 | D838-DV29Pd7BG5 | 69.83 | 64.03 | 59.38 | 56.69 | | | | |
| 1838 | D838-DV29PG5 | 69.85 | 73.02 | 73.01 | 70.69 | | | | |
| 1839 | D839-DV29PG5 | 67.89 | 62.97 | 65.43 | 63.36 | | | | |
| 1839 | D839-DV29Pd7BG5 | 75.62 | 72.52 | 73.96 | 67.02 | | | | |

[0719] As shown in Table 41, the conjugates formed by conjugation of these sequences with GalNAc compounds exhibited significant inhibitory effects on the expression of AGT protein in serum. For example, D576s-DV29PG5 exhibited inhibition rates of 84.09%, 82.11%, and 85.25% on Day 7, Day 14, and Day 21, respectively (FIG. 9).

[0720] The results demonstrated that the unmodified sequences designed in the present disclosure, such as 1579, 1789, 1812, 1576s, 1578s, and 1585s, when subjected to the template modifications of the present disclosure, optionally in combination with anti-off-target designs, and conjugated with GalNAc compounds, can be efficiently delivered to the liver in animals and can significantly inhibit AGT gene expression.

### SUMMARY

[0721] The unmodified sequences designed in the present disclosure, such as 1579, 1789, 1812, 1576s, 1578s, and 1585s, when subjected to the template modifications of the present disclosure, optionally in combination with anti-off-target designs, and conjugated with GalNAc compounds, can be efficiently delivered to the liver in animals and can continuously and significantly inhibit AGT gene expression.

[0722] For example, D576s-DV29PG5 exhibited inhibition rates of 84.09%, 82.11%, and 85.25% on Day 7, Day 14, and Day 28, respectively.

### Conclusion:

[0723] The present disclosure designed a series of siRNAs based on the AGT mRNA sequence, which were alternately modified or modified using a specific set of modification templates, and some of the sequences were subjected to anti-off-target designs. The results demonstrated that:
[0724] (1) A total of 13 unmodified sequences exhibited significant inhibitory effects on the AGT gene, with inhibition rates exceeding 45%, including 1576s, 1579, 1812, 1578s, 1789, 1835, 1838, 1795, 1585s, 1816, 1791, 1836, and 1839.
[0725] (2) The multiply modified sequences exhibit an inhibition rate of up to 70% or higher. Moreover, the modified sequences conjugated with GalNAc compounds can be efficiently delivered to the liver in animals and can significantly inhibit AGT gene expression.

### The Details are as Follows:

### 1. The Alternately Modified Sequences of the Present Disclosure Exhibited Significant Inhibitory Effects on the AGT Gene.

[0726] (1) Among the 99 designed sequences, 33 sequences exhibited significant inhibitory effects on the AGT gene, with inhibition rates exceeding 40%. Specifically, 10 sequences exhibited inhibition rates exceeding 60%.
[0727] (2) A total of 23 sequences exhibited inhibition rates ranging from 25% to 40% on the AGT gene. For example, the inhibition rates of B734-AL and B994-AL were 39.2% and 37.3%, respectively.
[0728] (3) A total of 43 sequences exhibited inhibition rates below 25% on the AGT gene. For example, the inhibition rate of B1017-AL was only 23.1%.
[0729] (4) siRNAs with similar sequences exhibited significant differences in activity. For example, the inhibition rate of B1365-AL was 40.4% higher than that of B1367-AL, indicating a significant improvement, while the two sequences differed by only 2 terminal bases; the inhibition rate of B1816-AL was 30.5% higher than that of B1815-AL, indicating a significant improvement, while the two sequences differed by only 1 terminal base. Therefore, screening oligonucleotide sequences with significant inhibitory activity from a vast number of candidate sequences designed for AGT mRNA sequences is not straightforward and requires substantial creative effort.

### 2. The Unmodified Sequences of the Present Disclosure Exhibited Significant Inhibitory Effects on the AGT Gene.

[0730] (1) A total of 13 unmodified sequences exhibited significant inhibitory effects on the AGT gene, with inhibition rates exceeding 45%, including 1576s, 1579, 1812, 1578s, 1789, 1835, 1838, 1795, 1585s, 1816, 1791, 1836, and 1839. Specifically, 1576s, 1578s, 1812, 1579, 1789, 1835, and 1838 exhibited inhibition rates exceeding 50%.
[0731] (2) The other unmodified sequences exhibited inhibition rates below 45% on the AGT gene. For example, the inhibition rates of 731 and 1011 were only 1.3% and 2.1%, respectively.
[0732] (3) siRNAs with similar sequences exhibited significant differences in activity. For example, the inhibition rate of unmodified sequence 734 was 41.7% higher than that of unmodified sequence 731, indicating a significant improvement.
[0733] (4) The effects of alternating modifications on activity varied across different sequences. For some sequences, the inhibition rate was significantly improved, e.g., unmodified sequence 731 exhibited a 25.1% increase in inhibition rate after alternating modification. For others, the improvement was minimal, e.g., unmodified sequences 994, 1279, and 1591 exhibited virtually no difference in inhibition rate between alternately modified and unmodified sequences.

### 3. The Sequences Modified Using the Modification Templates of the Present Disclosure Exhibited Significant Inhibitory Effects on the AGT Gene.

[0734] (1) The screened unmodified sequences 1576s, 1578s, 1838, 1835, 1816, 1812, 1579, 1836, 1789, 1839, 1791, 1795, and 1585s, when modified with templates DV25P-29P designed in the present disclosure, exhibited significant inhibitory effects on AGT gene expression, with inhibition rates of 40% or more. Specifically, C1812-DV25P, C1579-DV33P, and C1789-DV26P achieved inhibition rates of 74.4%, 74.0%, and 73.6%, respectively.
[0735] (2) The 12 sequences modified with templates DV25P-29P of the present disclosure showed a significant improvement in inhibition rate on AGT gene expression as compared to the alternately modified sequences. For example, the inhibition rate of unmodified sequence 1812 modified with template DV25P (C1579-DV33P) was 11.5% higher than that of the alternately modified sequence, while the inhibition rate of unmodified sequence 1791 modified with template DV26P (C1791-DV26P) was 8.5% higher than that of the alternately modified sequence.
[0736] (3) The same sequences modified with templates DV25-29P of the present disclosure exhibited significantly higher inhibition rates on AGT gene expression compared to modification with the templates disclosed in the prior art. For example, unmodified sequence 1579 modified with template DV25P of the present disclosure exhibited a 16.6% increase in inhibition rate compared to the sequence modified with the previously published Advanced ESC template DV22.
[0737] (4) The same sequences modified with templates DV25-29P of the present disclosure exhibited significantly higher inhibition rates on AGT gene expression compared to modification with templates DV32-34P of the present disclosure. For example, unmodified sequence 1812 modified with template DV25P of the present disclosure exhibited a 20.2% increase in inhibition rate compared to the sequence modified with template DV33P of the present disclosure.
[0738] (5) The activity of sequences modified with different templates varied greatly. For example, when unmodified sequence 1816 was modified with DV29P, the inhibition rate increased by 30.0% compared to modification with DV34; when unmodified sequence 1579 was modified with DV33P, the inhibition rate increased by 29.8% compared to modification with DV28P. Thus, it is uncertain which modification template would confer high activity to an siRNA sequence.
[0739] (6) The IC₅₀ values of these 24 sequences ranged from 1.884 pM to 61.498 pM. Specifically, the IC₅₀ values of C1789-DV25P, C1812-DV25P, and C1789-DV26P were 1.884 pM, 2.160 pM, and 2.643 pM, respectively. The results demonstrated that these sequences effectively inhibited AGT gene expression at low concentrations.
   4. The sequences modified by alternating modifications and the modification templates of the present disclosure exhibited significantly enhanced AGT inhibitory activity compared to the unmodified sequences with minimal differences disclosed in the prior art.

[0740] Compared to the unmodified sequences with minimal differences disclosed in the prior art, the unmodified sequences, alternately modified sequences, and sequences modified with specific modification templates of the present disclosure exhibited significantly higher inhibition rates on AGT gene expression, with an increase of up to 91%.
[0741] I. The unmodified sequences of the present disclosure exhibited significantly enhanced activity compared to the structurally similar unmodified sequences disclosed in the prior art. For example, unmodified sequence 1835 of the present disclosure exhibited a 37.7% increase in inhibition rate compared to the structurally similar 835P.
[0742] II. The alternately modified sequences of the present disclosure exhibited significantly enhanced activity compared to the structurally similar unmodified sequences disclosed in the prior art. For example, the alternately modified sequence B1812-AL of the present disclosure exhibited a 20.4% increase in inhibition rate compared to sequence 812P.
[0743] III. The sequences modified using the modification templates of the present disclosure exhibited significantly enhanced activity compared to the structurally similar unmodified sequences disclosed in the prior art. For example, the alternately modified sequence C1576s-DV29P of the present disclosure exhibited a 41.1% increase in inhibition rate compared to sequence 576P.
   5. The alternately modified sequences and template-modified sequences of the present disclosure, when incorporating specific anti-off-target designs, exhibited significant inhibitory effects on the AGT gene, thereby significantly reducing the inhibition of off-target genes.
[0744] (1) All modified sequences exhibited significant inhibitory effects on the AGT gene. For example, the template-modified sequence D576s-DV29P exhibited an inhibition rate of 83.8%, while the sequence D576s-DV29Pd7B with both template and anti-off-target modifications exhibited an inhibition rate of 85.4%.
[0745] (2) After using any one or more of the various modification patterns of the present disclosure, followed by anti-off-target design, the sequences exhibited significant anti-off-target effects on certain off-target genes, thereby reducing the inhibition of off-target genes, i.e., exhibiting anti-off-target effects, with a decrease of up to 72.535% in inhibition rate on off-target genes.
   6. The sequences modified using the modification templates of the present disclosure significantly inhibited the expression of AGT in mouse serum.

[0746] The unmodified sequences designed in the present disclosure, such as 1579, 1789, 1812, 1576s, 1578s, and 1585s, when subjected to the template modifications of the present disclosure, optionally in combination with anti-off-target designs, and conjugated with GalNAc compounds, can be efficiently delivered to the liver in animals and can continuously and significantly inhibit AGT gene expression.

[0747] For example, D576s-DV29PG5 exhibited inhibition rates of 84.09%, 82.11%, and 85.25% on Day 7, Day 14, and Day 21, respectively.

### Sequence Listing of the Present Disclosure

| Sequence | Sense strand | SEQ | Antisense strand | SEQ |
|---|---|---|---|---|
| ID | sequence 5′-3′ | ID NO. | sequence 5′-3′ | ID NO. |
| 1835 | UUGGGUUUUAAAAUUAAAGUA | 1 | UACUUUAAUUUUAAAACCCAAUU | 14 |
| 1816 | UUCAAGUUGAGAACAAAAAUU | 2 | AAUUUUUGUUCUCAACUUGAAAA | 15 |
| 1812 | CCUUUUCAAGUUGAGAACAAA | 3 | UUUGUUCUCAACUUGAAAAGGGA | 16 |
| 1579 | CCUUUUCUUCUAAUGAGUCGA | 4 | UCGACUCAUUAGAAGAAAAGGUG | 17 |
| 1836 | UGGGUUUUAAAAUUAAAGUAU | 5 | AUACUUUAAUUUUAAAACCCAAU | 18 |
| 1789 | GUUUGUGAAACAAAAAAGUGU | 6 | ACACUUUUUUGUUUCACAAACAA | 19 |
| 1839 | GUUUUAAAAUUAAAGUAUACA | 7 | UGUAUACUUUAAUUUUAAAACCC | 20 |
| 1791 | UUGUGAAACAAAAAAGUGUUA | 8 | UAACACUUUUUUGUUUCACAAAC | 21 |
| 1795 | GAAACAAAAAAGUGUUCCCUU | 9 | AAGGGAACACUUUUUUGUUUCAC | 22 |
| 1585s | CUUCUAAUGAGUCGACUUUA | 10 | UAAAGUCGACUCAUUAGAAGAA | 23 |
| 1576s | CCACCUUUUCUUCUAAUGAA | 11 | UUCAUUAGAAGAAAAGGUGGGA | 24 |
| 1578s | ACCUUUUCUUCUAAUGAGUA | 12 | UACUCAUUAGAAGAAAAGGUGG | 25 |
| 1838 | GGUUUUAAAAUUAAAGUAUAA | 13 | UUAUACUUUAAUUUUAAAACCCA | 26 |
| 1008 | CUUCACUGAGAGCGCCUGCCU | 27 | AGGCAGGCGCUCUCAGUGAAGGG | 113 |
| 1011 | CACUGAGAGCGCCUGCCUGCU | 28 | AGCAGGCAGGCGCUCUCAGUGAA | 114 |
| 1014 | UGAGAGCGCCUGCCUGCUGCU | 29 | AGCAGCAGGCAGGCGCUCUCAGU | 115 |
| 1016 | AGAGCGCCUGCCUGCUGCUGA | 30 | UCAGCAGCAGGCAGGCGCUCUCA | 116 |
| 1017 | GAGCGCCUGCCUGCUGCUGAU | 31 | AUCAGCAGCAGGCAGGCGCUCUC | 117 |
| 1020 | CGCCUGCCUGCUGCUGAUCCA | 32 | UGGAUCAGCAGCAGGCAGGCGCU | 118 |
| 1024 | UGCCUGCUGCUGAUCCAGCCU | 33 | AGGCUGGAUCAGCAGCAGGCAGG | 119 |
| 1026 | CCUGCUGCUGAUCCAGCCUCA | 34 | UGAGGCUGGAUCAGCAGCAGGCA | 120 |
| 1028 | UGCUGCUGAUCCAGCCUCACU | 35 | AGUGAGGCUGGAUCAGCAGCAGG | 121 |
| 1029 | GCUGCUGAUCCAGCCUCACUA | 36 | UAGUGAGGCUGGAUCAGCAGCAG | 122 |
| 1030 | CUGCUGAUCCAGCCUCACUAU | 37 | AUAGUGAGGCUGGAUCAGCAGCA | 123 |
| 1038 | CCAGCCUCACUAUGCCUCUGA | 38 | UCAGAGGCAUAGUGAGGCUGGAU | 124 |
| 1041 | GCCUCACUAUGCCUCUGACCU | 39 | AGGUCAGAGGCAUAGUGAGGCUG | 125 |
| 1044 | UCACUAUGCCUCUGACCUGGA | 40 | UCCAGGUCAGAGGCAUAGUGAGG | 126 |
| 1046 | ACUAUGCCUCUGACCUGGACA | 41 | UGUCCAGGUCAGAGGCAUAGUGA | 127 |
| 1047 | CUAUGCCUCUGACCUGGACAA | 42 | UUGUCCAGGUCAGAGGCAUAGUG | 128 |
| 1053 | CUCUGACCUGGACAAGGUGGA | 43 | UCCACCUUGUCCAGGUCAGAGGC | 129 |
| 1057 | GACCUGGACAAGGUGGAGGGU | 44 | ACCCUCCACCUUGUCCAGGUCAG | 130 |
| 1061 | UGGACAAGGUGGAGGGUCUCA | 45 | UGAGACCCUCCACCUUGUCCAGG | 131 |
| 1065s | CAAGGUGGAGGGUCUCACUU | 46 | AAGUGAGACCCUCCACCUUGUC | 132 |
| 1071 | GGAGGGUCUCACUUUCCAGCA | 47 | UGCUGGAAAGUGAGACCCUCCAC | 133 |
| 1260 | CAGGGUGGGGGAGGUGCUGAA | 48 | UUCAGCACCUCCCCCACCCUGAU | 134 |
| 1262 | GGGUGGGGGAGGUGCUGAACA | 49 | UGUUCAGCACCUCCCCCACCCUG | 135 |
| 1265 | UGGGGGAGGUGCUGAACAGCA | 50 | UGCUGUUCAGCACCUCCCCCACC | 136 |
| 1266 | GGGGGAGGUGCUGAACAGCAU | 51 | AUGCUGUUCAGCACCUCCCCCAC | 137 |
| 1267 | GGGGAGGUGCUGAACAGCAUU | 52 | AAUGCUGUUCAGCACCUCCCCCA | 138 |
| 1268 | GGGAGGUGCUGAACAGCAUUU | 53 | AAAUGCUGUUCAGCACCUCCCCC | 139 |
| 1279 | AACAGCAUUUUUUUUGAGCUU | 54 | AAGCUCAAAAAAAAUGCUGUUCA | 140 |
| 1281 | CAGCAUUUUUUUUGAGCUUGA | 55 | UCAAGCUCAAAAAAAAUGCUGUU | 141 |
| 1282 | AGCAUUUUUUUUGAGCUUGAA | 56 | UUCAAGCUCAAAAAAAAUGCUGU | 142 |
| 1362 | GGUGACCCUGAACCGCCCAUU | 57 | AAUGGGCGGUUCAGGGUCACCUC | 143 |
| 1365 | GACCCUGAACCGCCCAUUCCU | 58 | AGGAAUGGGCGGUUCAGGGUCAC | 144 |
| 1367 | CCCUGAACCGCCCAUUCCUGU | 59 | ACAGGAAUGGGCGGUUCAGGGUC | 145 |
| 1369 | CUGAACCGCCCAUUCCUGUUU | 60 | AAACAGGAAUGGGCGGUUCAGGG | 146 |
| 1393 | GUGUAUGAUCAAAGCGCCACU | 61 | AGUGGCGCUUUGAUCAUACACAG | 147 |
| 1401 | UCAAAGCGCCACUGCCCUGCA | 62 | UGCAGGGCAGUGGCGCUUUGAUC | 148 |
| 1404 | AAGCGCCACUGCCCUGCACUU | 63 | AAGUGCAGGGCAGUGGCGCUUUG | 149 |
| 1407 | CGCCACUGCCCUGCACUUCCU | 64 | AGGAAGUGCAGGGCAGUGGCGCU | 150 |
| 1554 | GCGAUGUGUCACCCCCAGUCU | 65 | AGACUGGGGGUGACACAUCGCUG | 151 |
| 1558 | UGUGUCACCCCCAGUCUCCCA | 66 | UGGGAGACUGGGGGUGACACAUC | 152 |
| 1561 | GUCACCCCCAGUCUCCCACCU | 67 | AGGUGGGAGACUGGGGGUGACAC | 153 |
| 1562 | UCACCCCCAGUCUCCCACCUU | 68 | AAGGUGGGAGACUGGGGGUGACA | 154 |
| 1564 | ACCCCCAGUCUCCCACCUUUU | 69 | AAAAGGUGGGAGACUGGGGGUGA | 155 |
| 1591 | AUGAGUCGACUUUGAGCUGGA | 70 | UCCAGCUCAAAGUCGACUCAUUA | 156 |
| 1592 | UGAGUCGACUUUGAGCUGGAA | 71 | UUCCAGCUCAAAGUCGACUCAUU | 157 |
| 1593 | GAGUCGACUUUGAGCUGGAAA | 72 | UUUCCAGCUCAAAGUCGACUCAU | 158 |
| 1596 | UCGACUUUGAGCUGGAAAGCA | 73 | UGCUUUCCAGCUCAAAGUCGACU | 159 |
| 1602 | UUGAGCUGGAAAGCAGCCGUU | 74 | AACGGCUGCUUUCCAGCUCAAAG | 160 |
| 1603 | UGAGCUGGAAAGCAGCCGUUU | 75 | AAACGGCUGCUUUCCAGCUCAAA | 161 |
| 1608 | UGGAAAGCAGCCGUUUCUCCU | 76 | AGGAGAAACGGCUGCUUUCCAGC | 162 |
| 1612 | AAGCAGCCGUUUCUCCUUGGU | 77 | ACCAAGGAGAAACGGCUGCUUUC | 163 |
| 1775 | CAACCGACCAGCUUGUUUGUA | 78 | UACAAACAAGCUGGUCGGUUGGA | 164 |
| 1790 | UUUGUGAAACAAAAAAGUGUU | 79 | AACACUUUUUUGUUUCACAAACA | 165 |
| 1796 | AAACAAAAAAGUGUUCCCUUU | 80 | AAAGGGAACACUUUUUUGUUUCA | 166 |
| 1798s | ACAAAAAAGUGUUCCCUUUU | 81 | AAAAGGGAACACUUUUUUGUUU | 167 |
| 1799 | CAAAAAAGUGUUCCCUUUUCA | 82 | UGAAAAGGGAACACUUUUUUGUU | 168 |
| 1810 | UCCCUUUUCAAGUUGAGAACA | 83 | UGUUCUCAACUUGAAAAGGGAAC | 169 |
| 1811 | CCCUUUUCAAGUUGAGAACAA | 84 | UUGUUCUCAACUUGAAAAGGGAA | 170 |
| 1814 | UUUUCAAGUUGAGAACAAAAA | 85 | UUUUUGUUCUCAACUUGAAAAGG | 171 |
| 1815 | UUUCAAGUUGAGAACAAAAAU | 86 | AUUUUUGUUCUCAACUUGAAAAG | 172 |
| 1817 | UCAAGUUGAGAACAAAAAUUG | 87 | CAAUUUUUGUUCUCAACUUGAAA | 173 |
| 1828 | ACAAAAAUUGGGUUUUAAAAU | 88 | AUUUUAAAACCCAAUUUUUGUUC | 174 |
| 1838s | GGUUUUAAAAUUAAAGUAUA | 89 | UAUACUUUAAUUUUAAAACCCA | 175 |
| 2018 | AUAGCUGGUUAUUUCUCCCUU | 90 | AAGGGAGAAAUAACCAGCUAUGG | 176 |
| 2020 | AGCUGGUUAUUUCUCCCUUGU | 91 | ACAAGGGAGAAAUAACCAGCUAU | 177 |
| 2025 | GUUAUUUCUCCCUUGUGUUAA | 92 | UUAACACAAGGGAGAAAUAACCA | 178 |
| 2030 | UUCUCCCUUGUGUUAGUAAUA | 93 | UAUUACUAACACAAGGGAGAAAU | 179 |
| 2031 | UCUCCCUUGUGUUAGUAAUAA | 94 | UUAUUACUAACACAAGGGAGAAA | 180 |
| 2032 | CUCCCUUGUGUUAGUAAUAAA | 95 | UUUAUUACUAACACAAGGGAGAA | 181 |
| 2033 | UCCCUUGUGUUAGUAAUAAAA | 96 | UUUUAUUACUAACACAAGGGAGA | 182 |
| 729 | AGAACUGGAUGUUGCUGCUGA | 97 | UCAGCAGCAACAUCCAGUUCUGU | 183 |
| 731 | AACUGGAUGUUGCUGCUGAGA | 98 | UCUCAGCAGCAACAUCCAGUUCU | 184 |
| 732 | ACUGGAUGUUGCUGCUGAGAA | 99 | UUCUCAGCAGCAACAUCCAGUUC | 185 |
| 734 | UGGAUGUUGCUGCUGAGAAGA | 100 | UCUUCUCAGCAGCAACAUCCAGU | 186 |
| 734s | UGGAUGUUGCUGCUGAGAAA | 101 | UUUCUCAGCAGCAACAUCCAGU | 187 |
| 736 | GAUGUUGCUGCUGAGAAGAUU | 102 | AAUCUUCUCAGCAGCAACAUCCA | 188 |
| 743 | CUGCUGAGAAGAUUGACAGGU | 103 | ACCUGUCAAUCUUCUCAGCAGCA | 189 |
| 753s | GAUUGACAGGUUCAUGCAGA | 104 | UCUGCAUGAACCUGUCAAUCUU | 190 |
| 963 | GCACUGGAGUGACAUCCAGGA | 105 | UCCUGGAUGUCACUCCAGUGCUG | 191 |
| 966 | CUGGAGUGACAUCCAGGACAA | 106 | UUGUCCUGGAUGUCACUCCAGUG | 192 |
| 969 | GAGUGACAUCCAGGACAACUU | 107 | AAGUUGUCCUGGAUGUCACUCCA | 193 |
| 971 | GUGACAUCCAGGACAACUUCU | 108 | AGAAGUUGUCCUGGAUGUCACUC | 194 |
| 982 | GACAACUUCUCGGUGACUCAA | 109 | UUGAGUCACCGAGAAGUUGUCCU | 195 |
| 984 | CAACUUCUCGGUGACUCAAGU | 110 | ACUUGAGUCACCGAGAAGUUGUC | 196 |
| 992 | CGGUGACUCAAGUGCCCUUCA | 111 | UGAAGGGCACUUGAGUCACCGAG | 197 |
| 994 | GUGACUCAAGUGCCCUUCACU | 112 | AGUGAAGGGCACUUGAGUCACCG | 198 |
| B1835-AL | Ufs-Ums-Gf-Gm-Gf-Um-Uf-Um-Uf- | 199 | Ums-Afs-Cm-Uf-Um-Uf-Am-Af-Um- | 212 |
| | Am-Af-Am-Af-Um-Uf-Am-Af-Am-Gf- | | Uf-Um-Uf-Am-Af-Am-Af-Cm-Cf-Cm- | |
| | Um-Af | | Af-Ams-Ufs-Um | |
| B1816-AL | Ufs-Ums-Cf-Am-Af-Gm-Uf-Um-Gf- | 200 | Ams-Afs-Um-Uf-Um-Uf-Um-Gf-Um- | 213 |
| | Am-Gf-Am-Af-Cm-Af-Am-Af-Am-Af- | | Uf-Cm-Uf-Cm-Af-Am-Cf-Um-Uf-Gm- | |
| | Um-Uf | | Af-Ams-Afs-Am | |
| B1812-AL | Cfs-Cms-Uf-Um-Uf-Um-Cf-Am-Af- | 201 | Ums-Ufs-Um-Gf-Um-Uf-Cm-Uf-Cm-Af- | 214 |
| | Gm-Uf-Um-Gf-Am-Gf-Am-Af-Cm-Af- | | Am-Cf-Um-Uf-Gm-Af-Am-Af-Am-Gf- | |
| | Am-Af | | Gms-Gfs-Am | |
| B1579-AL | Cfs-Cms-Uf-Um-Uf-Um-Cf-Um-Uf- | 202 | Ums-Cfs-Gm-Af-Cm-Uf-Cm-Af-Um-Uf- | 215 |
| | Cm-Uf-Am-Af-Um-Gf-Am-Gf-Um-Cf- | | Am-Gf-Am-Af-Gm-Af-Am-Af-Am-Gf- | |
| | Gm-Af | | Gms-Ufs-Gm | |
| B1836-AL | Ufs-Gms-Gf-Gm-Uf-Um-Uf-Um-Af- | 203 | Ams-Ufs-Am-Cf-Um-Uf-Um-Af-Am- | 216 |
| | Am-Af-Am-Uf-Um-Af-Am-Af-Gm-Uf- | | Uf-Um-Uf-Um-Af-Am-Af-Am-Cf-Cm- | |
| | Am-Uf | | Cf-Ams-Afs-Um | |
| B1789-AL | Gfs-Ums-Uf-Um-Gf-Um-Gf-Am-Af- | 204 | Ams-Cfs-Am-Cf-Um-Uf-Um-Uf-Um-Uf- | 217 |
| | Am-Cf-Am-Af-Am-Af-Am-Af-Gm-Uf- | | Gm-Uf-Um-Uf-Cm-Af-Cm-Af-Am-Af- | |
| | Gm-Uf | | Cms-Afs-Am | |
| B1839-AL | Gfs-Ums-Uf-Um-Uf-Am-Af-Am-Af- | 205 | Ums-Gfs-Um-Af-Um-Af-Cm-Uf-Um- | 218 |
| | Um-Uf-Am-Af-Am-Gf-Um-Af-Um-Af- | | Uf-Am-Af-Um-Uf-Um-Uf-Am-Af-Am- | |
| | Cm-Af | | Af-Cms-Cfs-Cm | |
| B1791-AL | Ufs-Ums-Gf-Um-Gf-Am-Af-Am-Cf- | 206 | Ums-Afs-Am-Cf-Am-Cf-Um-Uf-Um-Uf- | 219 |
| | Am-Af-Am-Af-Am-Af-Gm-Uf-Gm-Uf- | | Um-Uf-Gm-Uf-Um-Uf-Cm-Af-Cm-Af- | |
| | Um-Af | | Ams-Afs-Cm | |
| B1795-AL | Gfs-Ams-Af-Am-Cf-Am-Af-Am-Af- | 207 | Ams-Afs-Gm-Gf-Gm-Af-Am-Cf-Am-Cf- | 220 |
| | Am-Af-Gm-Uf-Gm-Uf-Um-Cf-Cm-Cf- | | Um-Uf-Um-Uf-Um-Uf-Gm-Uf-Um-Uf- | |
| | Um-Uf | | Cms-Afs-Cm | |
| B1585s- | Cms-Ufs-Um-Cf-Um-Af-Am-Uf-Gm- | 208 | Ums-Afs-Am-Af-Gm-Uf-Cm-Gf-Am-Cf- | 221 |
| AL | Af-Gm-Uf-Cm-Gf-Am-Cf-Um-Uf-Um- | | Um-Cf-Am-Uf-Um-Af-Gm-Af-Am-Gfs- | |
| | Af | | Ams-Af | |
| B1576s- | Cms-Cfs-Am-Cf-Cm-Uf-Um-Uf-Um- | 209 | Ums-Ufs-Cm-Af-Um-Uf-Am-Gf-Am- | 222 |
| AL | Cf-Um-Uf-Cm-Uf-Am-Af-Um-Gf-Am- | | Af-Gm-Af-Am-Af-Am-Gf-Gm-Uf-Gm- | |
| | Af | | Gfs-Gms-Af | |
| B1578s- | Ams-Cfs-Cm-Uf-Um-Uf-Um-Cf-Um- | 210 | Ums-Afs-Cm-Uf-Cm-Af-Um-Uf-Am-Gf- | 223 |
| AL | Uf-Cm-Uf-Am-Af-Um-Gf-Am-Gf-Um- | | Am-Af-Gm-Af-Am-Af-Am-Gf-Gm-Ufs- | |
| | Af | | Gms-Gf | |
| B1838-AL | Gfs-Gms-Uf-Um-Uf-Um-Af-Am-Af- | 211 | Ums-Ufs-Am-Uf-Am-Cf-Um-Uf-Um- | 224 |
| | Am-Uf-Um-Af-Am-Af-Gm-Uf-Am-Uf- | | Af-Am-Uf-Um-Uf-Um-Af-Am-Af-Am- | |
| | Am-Af | | Cf-Cms-Cfs-Am | |
| B1008-AL | Cfs-Ums-Uf-Cm-Af-Cm-Uf-Gm-Af- | 225 | Ams-Gfs-Gm-Cf-Am-Gf-Gm-Cf-Gm-Cf- | 311 |
| | Gm-Af-Gm-Cf-Gm-Cf-Cm-Uf-Gm-Cf- | | Um-Cf-Um-Cf-Am-Gf-Um-Gf-Am-Af- | |
| | Cm-Uf | | Gms-Gfs-Gm | |
| B1011-AL | Cfs-Ams-Cf-Um-Gf-Am-Gf-Am-Gf- | 226 | Ams-Gfs-Cm-Af-Gm-Gf-Cm-Af-Gm-Gf- | 312 |
| | Cm-Gf-Cm-Cf-Um-Gf-Cm-Cf-Um-Gf- | | Cm-Gf-Cm-Uf-Cm-Uf-Cm-Af-Gm-Uf- | |
| | Cm-Uf | | Gms-Afs-Am | |
| B1014-AL | Ufs-Gms-Af-Gm-Af-Gm-Cf-Gm-Cf- | 227 | Ams-Gfs-Cm-Af-Gm-Cf-Am-Gf-Gm-Cf- | 313 |
| | Cm-Uf-Gm-Cf-Cm-Uf-Gm-Cf-Um-Gf- | | Am-Gf-Gm-Cf-Gm-Cf-Um-Cf-Um-Cf- | |
| | Cm-Uf | | Ams-Gfs-Um | |
| B1016-AL | Afs-Gms-Af-Gm-Cf-Gm-Cf-Cm-Uf- | 228 | Ums-Cfs-Am-Gf-Cm-Af-Gm-Cf-Am-Gf- | 314 |
| | Gm-Cf-Cm-Uf-Gm-Cf-Um-Gf-Cm-Uf- | | Gm-Cf-Am-Gf-Gm-Cf-Gm-Cf-Um-Cf- | |
| | Gm-Af | | Ums-Cfs-Am | |
| B1017-AL | Gfs-Ams-Gf-Cm-Gf-Cm-Cf-Um-Gf- | 229 | Ams-Ufs-Cm-Af-Gm-Cf-Am-Gf-Cm-Af- | 315 |
| | Cm-Cf-Um-Gf-Cm-Uf-Gm-Cf-Um-Gf- | | Gm-Gf-Cm-Af-Gm-Gf-Cm-Gf-Cm-Uf- | |
| | Am-Uf | | Cms-Ufs-Cm | |
| B1020-AL | Cfs-Gms-Cf-Cm-Uf-Gm-Cf-Cm-Uf- | 230 | Ums-Gfs-Gm-Af-Um-Cf-Am-Gf-Cm-Af- | 316 |
| | Gm-Cf-Um-Gf-Cm-Uf-Gm-Af-Um-Cf- | | Gm-Cf-Am-Gf-Gm-Cf-Am-Gf-Gm-Cf- | |
| | Cm-Af | | Gms-Cfs-Um | |
| B1024-AL | Ufs-Gms-Cf-Cm-Uf-Gm-Cf-Um-Gf- | 231 | Ams-Gfs-Gm-Cf-Um-Gf-Gm-Af-Um-Cf- | 317 |
| | Cm-Uf-Gm-Af-Um-Cf-Cm-Af-Gm-Cf- | | Am-Gf-Cm-Af-Gm-Cf-Am-Gf-Gm-Cf- | |
| | Cm-Uf | | Ams-Gfs-Gm | |
| B1026-AL | Cfs-Cms-Uf-Gm-Cf-Um-Gf-Cm-Uf- | 232 | Ums-Gfs-Am-Gf-Gm-Cf-Um-Gf-Gm- | 318 |
| | Gm-Af-Um-Cf-Cm-Af-Gm-Cf-Cm-Uf- | | Af-Um-Cf-Am-Gf-Cm-Af-Gm-Cf-Am- | |
| | Cm-Af | | Gf-Gms-Cfs-Am | |
| B1028-AL | Ufs-Gms-Cf-Um-Gf-Cm-Uf-Gm-Af- | 233 | Ams-Gfs-Um-Gf-Am-Gf-Gm-Cf-Um- | 319 |
| | Um-Cf-Cm-Af-Gm-Cf-Cm-Uf-Cm-Af- | | Gf-Gm-Af-Um-Cf-Am-Gf-Cm-Af-Gm- | |
| | Cm-Uf | | Cf-Ams-Gfs-Gm | |
| B1029-AL | Gfs-Cms-Uf-Gm-Cf-Um-Gf-Am-Uf- | 234 | Ums-Afs-Gm-Uf-Gm-Af-Gm-Gf-Cm- | 320 |
| | Cm-Cf-Am-Gf-Cm-Cf-Um-Cf-Am-Cf- | | Uf-Gm-Gf-Am-Uf-Cm-Af-Gm-Cf-Am- | |
| | Um-Af | | Gf-Cms-Afs-Gm | |
| B1030-AL | Cfs-Ums-Gf-Cm-Uf-Gm-Af-Um-Cf- | 235 | Ams-Ufs-Am-Gf-Um-Gf-Am-Gf-Gm- | 321 |
| | Cm-Af-Gm-Cf-Cm-Uf-Cm-Af-Cm-Uf- | | Cf-Um-Gf-Gm-Af-Um-Cf-Am-Gf-Cm- | |
| | Am-Uf | | Af-Gms-Cfs-Am | |
| B1038-AL | Cfs-Cms-Af-Gm-Cf-Cm-Uf-Cm-Af- | 236 | Ums-Cfs-Am-Gf-Am-Gf-Gm-Cf-Am-Uf- | 322 |
| | Cm-Uf-Am-Uf-Gm-Cf-Cm-Uf-Cm-Uf- | | Am-Gf-Um-Gf-Am-Gf-Gm-Cf-Um-Gf- | |
| | Gm-Af | | Gms-Afs-Um | |
| B1041-AL | Gfs-Cms-Cf-Um-Cf-Am-Cf-Um-Af- | 237 | Ams-Gfs-Gm-Uf-Cm-Af-Gm-Af-Gm- | 323 |
| | Um-Gf-Cm-Cf-Um-Cf-Um-Gf-Am-Cf- | | Gf-Cm-Af-Um-Af-Gm-Uf-Gm-Af-Gm- | |
| | Cm-Uf | | Gf-Cms-Ufs-Gm | |
| B1044-AL | Ufs-Cms-Af-Cm-Uf-Am-Uf-Gm-Cf- | 238 | Ums-Cfs-Cm-Af-Gm-Gf-Um-Cf-Am-Gf- | 324 |
| | Cm-Uf-Cm-Uf-Gm-Af-Cm-Cf-Um-Gf- | | Am-Gf-Gm-Cf-Am-Uf-Am-Gf-Um-Gf- | |
| | Gm-Af | | Ams-Gfs-Gm | |
| B1046-AL | Afs-Cms-Uf-Am-Uf-Gm-Cf-Cm-Uf- | 239 | Ums-Gfs-Um-Cf-Cm-Af-Gm-Gf-Um-Cf- | 325 |
| | Cm-Uf-Gm-Af-Cm-Cf-Um-Gf-Gm-Af- | | Am-Gf-Am-Gf-Gm-Cf-Am-Uf-Am-Gf- | |
| | Cm-Af | | Ums-Gfs-Am | |
| B1047-AL | Cfs-Ums-Af-Um-Gf-Cm-Cf-Um-Cf- | 240 | Ums-Ufs-Gm-Uf-Cm-Cf-Am-Gf-Gm-Uf- | 326 |
| | Um-Gf-Am-Cf-Cm-Uf-Gm-Gf-Am-Cf- | | Cm-Af-Gm-Af-Gm-Gf-Cm-Af-Um-Af- | |
| | Am-Af | | Gms-Ufs-Gm | |
| B1053-AL | Cfs-Ums-Cf-Um-Gf-Am-Cf-Cm-Uf- | 241 | Ums-Cfs-Cm-Af-Cm-Cf-Um-Uf-Gm-Uf- | 327 |
| | Gm-Gf-Am-Cf-Am-Af-Gm-Gf-Um-Gf- | | Cm-Cf-Am-Gf-Gm-Uf-Cm-Af-Gm-Af- | |
| | Gm-Af | | Gms-Gfs-Cm | |
| B1057-AL | Gfs-Ams-Cf-Cm-Uf-Gm-Gf-Am-Cf- | 242 | Ams-Cfs-Cm-Cf-Um-Cf-Cm-Af-Cm-Cf- | 328 |
| | Am-Af-Gm-Gf-Um-Gf-Gm-Af-Gm-Gf- | | Um-Uf-Gm-Uf-Cm-Cf-Am-Gf-Gm-Uf- | |
| | Gm-Uf | | Cms-Afs-Gm | |
| B1061-AL | Ufs-Gms-Gf-Am-Cf-Am-Af-Gm-Gf- | 243 | Ums-Gfs-Am-Gf-Am-Cf-Cm-Cf-Um-Cf- | 329 |
| | Um-Gf-Gm-Af-Gm-Gf-Gm-Uf-Cm-Uf- | | Cm-Af-Cm-Cf-Um-Uf-Gm-Uf-Cm-Cf- | |
| | Cm-Af | | Ams-Gfs-Gm | |
| B1065s- | Cms-Afs-Am-Gf-Gm-Uf-Gm-Gf-Am- | 244 | Ams-Afs-Gm-Uf-Gm-Af-Gm-Af-Cm-Cf- | 330 |
| AL | Gf-Gm-Gf-Um-Cf-Um-Cf-Am-Cf-Um- | | Cm-Uf-Cm-Cf-Am-Cf-Cm-Uf-Um-Gfs- | |
| | Uf | | Ums-Cf | |
| B1071-AL | Gfs-Gms-Af-Gm-Gf-Gm-Uf-Cm-Uf- | 245 | Ums-Gfs-Cm-Uf-Gm-Gf-Am-Af-Am- | 331 |
| | Cm-Af-Cm-Uf-Um-Uf-Cm-Cf-Am-Gf- | | Gf-Um-Gf-Am-Gf-Am-Cf-Cm-Cf-Um- | |
| | Cm-Af | | Cf-Cms-Afs-Cm | |
| B1260-AL | Cfs-Ams-Gf-Gm-Gf-Um-Gf-Gm-Gf- | 246 | Ums-Ufs-Cm-Af-Gm-Cf-Am-Cf-Cm-Uf- | 332 |
| | Gm-Gf-Am-Gf-Gm-Uf-Gm-Cf-Um-Gf- | | Cm-Cf-Cm-Cf-Cm-Af-Cm-Cf-Cm-Uf- | |
| | Am-Af | | Gms-Afs-Um | |
| B1262-AL | Gfs-Gms-Gf-Um-Gf-Gm-Gf-Gm-Gf- | 247 | Ums-Gfs-Um-Uf-Cm-Af-Gm-Cf-Am-Cf- | 333 |
| | Am-Gf-Gm-Uf-Gm-Cf-Um-Gf-Am-Af- | | Cm-Uf-Cm-Cf-Cm-Cf-Cm-Af-Cm-Cf- | |
| | Cm-Af | | Cms-Ufs-Gm | |
| B1265-AL | Ufs-Gms-Gf-Gm-Gf-Gm-Af-Gm-Gf- | 248 | Ums-Gfs-Cm-Uf-Gm-Uf-Um-Cf-Am-Gf- | 334 |
| | Um-Gf-Cm-Uf-Gm-Af-Am-Cf-Am-Gf- | | Cm-Af-Cm-Cf-Um-Cf-Cm-Cf-Cm-Cf- | |
| | Cm-Af | | Ams-Cfs-Cm | |
| B1266-AL | Gfs-Gms-Gf-Gm-Gf-Am-Gf-Gm-Uf- | 249 | Ams-Ufs-Gm-Cf-Um-Gf-Um-Uf-Cm-Af- | 335 |
| | Gm-Cf-Um-Gf-Am-Af-Cm-Af-Gm-Cf- | | Gm-Cf-Am-Cf-Cm-Uf-Cm-Cf-Cm-Cf- | |
| | Am-Uf | | Cms-Afs-Cm | |
| B1267-AL | Gfs-Gms-Gf-Gm-Af-Gm-Gf-Um-Gf- | 250 | Ams-Afs-Um-Gf-Cm-Uf-Gm-Uf-Um-Cf- | 336 |
| | Cm-Uf-Gm-Af-Am-Cf-Am-Gf-Cm-Af- | | Am-Gf-Cm-Af-Cm-Cf-Um-Cf-Cm-Cf- | |
| | Um-Uf | | Cms-Cfs-Am | |
| B1268-AL | Gfs-Gms-Gf-Am-Gf-Gm-Uf-Gm-Cf- | 251 | Ams-Afs-Am-Uf-Gm-Cf-Um-Gf-Um- | 337 |
| | Um-Gf-Am-Af-Cm-Af-Gm-Cf-Am-Uf- | | Uf-Cm-Af-Gm-Cf-Am-Cf-Cm-Uf-Cm- | |
| | Um-Uf | | Cf-Cms-Cfs-Cm | |
| B1279-AL | Afs-Ams-Cf-Am-Gf-Cm-Af-Um-Uf- | 252 | Ams-Afs-Gm-Cf-Um-Cf-Am-Af-Am-Af- | 338 |
| | Um-Uf-Um-Uf-Um-Uf-Gm-Af-Gm-Cf- | | Am-Af-Am-Af-Um-Gf-Cm-Uf-Gm-Uf- | |
| | Um-Uf | | Ums-Cfs-Am | |
| B1281-AL | Cfs-Ams-Gf-Cm-Af-Um-Uf-Um-Uf- | 253 | Ums-Cfs-Am-Af-Gm-Cf-Um-Cf-Am-Af- | 339 |
| | Um-Uf-Um-Uf-Gm-Af-Gm-Cf-Um-Uf- | | Am-Af-Am-Af-Am-Af-Um-Gf-Cm-Uf- | |
| | Gm-Af | | Gms-Ufs-Um | |
| B1282-AL | Afs-Gms-Cf-Am-Uf-Um-Uf-Um-Uf- | 254 | Ums-Ufs-Cm-Af-Am-Gf-Cm-Uf-Cm-Af- | 340 |
| | Um-Uf-Um-Gf-Am-Gf-Cm-Uf-Um-Gf- | | Am-Af-Am-Af-Am-Af-Am-Uf-Gm-Cf- | |
| | Am-Af | | Ums-Gfs-Um | |
| B1362-AL | Gfs-Gms-Uf-Gm-Af-Cm-Cf-Cm-Uf- | 255 | Ams-Afs-Um-Gf-Gm-Gf-Cm-Gf-Gm- | 341 |
| | Gm-Af-Am-Cf-Cm-Gf-Cm-Cf-Cm-Af- | | Uf-Um-Cf-Am-Gf-Gm-Gf-Um-Cf-Am- | |
| | Um-Uf | | Cf-Cms-Ufs-Cm | |
| B1365-AL | Gfs-Ams-Cf-Cm-Cf-Um-Gf-Am-Af- | 256 | Ams-Gfs-Gm-Af-Am-Uf-Gm-Gf-Gm- | 342 |
| | Cm-Cf-Gm-Cf-Cm-Cf-Am-Uf-Um-Cf- | | Cf-Gm-Gf-Um-Uf-Cm-Af-Gm-Gf-Gm- | |
| | Cm-Uf | | Uf-Cms-Afs-Cm | |
| B1367-AL | Cfs-Cms-Cf-Um-Gf-Am-Af-Cm-Cf- | 257 | Ams-Cfs-Am-Gf-Gm-Af-Am-Uf-Gm- | 343 |
| | Gm-Cf-Cm-Cf-Am-Uf-Um-Cf-Cm-Uf- | | Gf-Gm-Cf-Gm-Gf-Um-Uf-Cm-Af-Gm- | |
| | Gm-Uf | | Gf-Gms-Ufs-Cm | |
| B1369-AL | Cfs-Ums-Gf-Am-Af-Cm-Cf-Gm-Cf- | 258 | Ams-Afs-Am-Cf-Am-Gf-Gm-Af-Am- | 344 |
| | Cm-Cf-Am-Uf-Um-Cf-Cm-Uf-Gm-Uf- | | Uf-Gm-Gf-Gm-Cf-Gm-Gf-Um-Uf-Cm- | |
| | Um-Uf | | Af-Gms-Gfs-Gm | |
| B1393-AL | Gfs-Ums-Gf-Um-Af-Um-Gf-Am-Uf- | 259 | Ams-Gfs-Um-Gf-Gm-Cf-Gm-Cf-Um-Uf- | 345 |
| | Cm-Af-Am-Af-Gm-Cf-Gm-Cf-Cm-Af- | | Um-Gf-Am-Uf-Cm-Af-Um-Af-Cm-Af- | |
| | Cm-Uf | | Cms-Afs-Gm | |
| B1401-AL | Ufs-Cms-Af-Am-Af-Gm-Cf-Gm-Cf- | 260 | Ums-Gfs-Cm-Af-Gm-Gf-Gm-Cf-Am-Gf- | 346 |
| | Cm-Af-Cm-Uf-Gm-Cf-Cm-Cf-Um-Gf- | | Um-Gf-Gm-Cf-Gm-Cf-Um-Uf-Um-Gf- | |
| | Cm-Af | | Ams-Ufs-Cm | |
| B1404-AL | Afs-Ams-Gf-Cm-Gf-Cm-Cf-Am-Cf- | 261 | Ams-Afs-Gm-Uf-Gm-Cf-Am-Gf-Gm- | 347 |
| | Um-Gf-Cm-Cf-Cm-Uf-Gm-Cf-Am-Cf- | | Gf-Cm-Af-Gm-Uf-Gm-Gf-Cm-Gf-Cm- | |
| | Um-Uf | | Uf-Ums-Ufs-Gm | |
| B1407-AL | Cfs-Gms-Cf-Cm-Af-Cm-Uf-Gm-Cf- | 262 | Ams-Gfs-Gm-Af-Am-Gf-Um-Gf-Cm- | 348 |
| | Cm-Cf-Um-Gf-Cm-Af-Cm-Uf-Um-Cf- | | Af-Gm-Gf-Gm-Cf-Am-Gf-Um-Gf-Gm- | |
| | Cm-Uf | | Cf-Gms-Cfs-Um | |
| B1554-AL | Gfs-Cms-Gf-Am-Uf-Gm-Uf-Gm-Uf- | 263 | Ams-Gfs-Am-Cf-Um-Gf-Gm-Gf-Gm- | 349 |
| | Cm-Af-Cm-Cf-Cm-Cf-Cm-Af-Gm-Uf- | | Gf-Um-Gf-Am-Cf-Am-Cf-Am-Uf-Cm- | |
| | Cm-Uf | | Gf-Cms-Ufs-Gm | |
| B1558-AL | Ufs-Gms-Uf-Gm-Uf-Cm-Af-Cm-Cf- | 264 | Ums-Gfs-Gm-Gf-Am-Gf-Am-Cf-Um- | 350 |
| | Cm-Cf-Cm-Af-Gm-Uf-Cm-Uf-Cm-Cf- | | Gf-Gm-Gf-Gm-Gf-Um-Gf-Am-Cf-Am- | |
| | Cm-Af | | Cf-Ams-Ufs-Cm | |
| B1561-AL | Gfs-Ums-Cf-Am-Cf-Cm-Cf-Cm-Cf- | 265 | Ams-Gfs-Gm-Uf-Gm-Gf-Gm-Af-Gm- | 351 |
| | Am-Gf-Um-Cf-Um-Cf-Cm-Cf-Am-Cf- | | Af-Cm-Uf-Gm-Gf-Gm-Gf-Gm-Uf-Gm- | |
| | Cm-Uf | | Af-Cms-Afs-Cm | |
| B1562-AL | Ufs-Cms-Af-Cm-Cf-Cm-Cf-Cm-Af- | 266 | Ams-Afs-Gm-Gf-Um-Gf-Gm-Gf-Am- | 352 |
| | Gm-Uf-Cm-Uf-Cm-Cf-Cm-Af-Cm-Cf- | | Gf-Am-Cf-Um-Gf-Gm-Gf-Gm-Gf-Um- | |
| | Um-Uf | | Gf-Ams-Cfs-Am | |
| B1564-AL | Afs-Cms-Cf-Cm-Cf-Cm-Af-Gm-Uf- | 267 | Ams-Afs-Am-Af-Gm-Gf-Um-Gf-Gm- | 353 |
| | Cm-Uf-Cm-Cf-Cm-Af-Cm-Cf-Um-Uf- | | Gf-Am-Gf-Am-Cf-Um-Gf-Gm-Gf-Gm- | |
| | Um-Uf | | Gf-Ums-Gfs-Am | |
| B1591-AL | Afs-Ums-Gf-Am-Gf-Um-Cf-Gm-Af- | 268 | Ums-Cfs-Cm-Af-Gm-Cf-Um-Cf-Am-Af- | 354 |
| | Cm-Uf-Um-Uf-Gm-Af-Gm-Cf-Um-Gf- | | Am-Gf-Um-Cf-Gm-Af-Cm-Uf-Cm-Af- | |
| | Gm-Af | | Ums-Ufs-Am | |
| B1592-AL | Ufs-Gms-Af-Gm-Uf-Cm-Gf-Am-Cf- | 269 | Ums-Ufs-Cm-Cf-Am-Gf-Cm-Uf-Cm-Af- | 355 |
| | Um-Uf-Um-Gf-Am-Gf-Cm-Uf-Gm-Gf- | | Am-Af-Gm-Uf-Cm-Gf-Am-Cf-Um-Cf- | |
| | Am-Af | | Ams-Ufs-Um | |
| B1593-AL | Gfs-Ams-Gf-Um-Cf-Gm-Af-Cm-Uf- | 270 | Ums-Ufs-Um-Cf-Cm-Af-Gm-Cf-Um-Cf- | 356 |
| | Um-Uf-Gm-Af-Gm-Cf-Um-Gf-Gm-Af- | | Am-Af-Am-Gf-Um-Cf-Gm-Af-Cm-Uf- | |
| | Am-Af | | Cms-Afs-Um | |
| B1596-AL | Ufs-Cms-Gf-Am-Cf-Um-Uf-Um-Gf- | 271 | Ums-Gfs-Cm-Uf-Um-Uf-Cm-Cf-Am-Gf- | 357 |
| | Am-Gf-Cm-Uf-Gm-Gf-Am-Af-Am-Gf- | | Cm-Uf-Cm-Af-Am-Af-Gm-Uf-Cm-Gf- | |
| | Cm-Af | | Ams-Cfs-Um | |
| B1602-AL | Ufs-Ums-Gf-Am-Gf-Cm-Uf-Gm-Gf- | 272 | Ams-Afs-Cm-Gf-Gm-Cf-Um-Gf-Cm-Uf- | 358 |
| | Am-Af-Am-Gf-Cm-Af-Gm-Cf-Cm-Gf- | | Um-Uf-Cm-Cf-Am-Gf-Cm-Uf-Cm-Af- | |
| | Um-Uf | | Ams-Afs-Gm | |
| B1603-AL | Ufs-Gms-Af-Gm-Cf-Um-Gf-Gm-Af- | 273 | Ams-Afs-Am-Cf-Gm-Gf-Cm-Uf-Gm-Cf- | 359 |
| | Am-Af-Gm-Cf-Am-Gf-Cm-Cf-Gm-Uf- | | Um-Uf-Um-Cf-Cm-Af-Gm-Cf-Um-Cf- | |
| | Um-Uf | | Ams-Afs-Am | |
| B1608-AL | Ufs-Gms-Gf-Am-Af-Am-Gf-Cm-Af- | 274 | Ams-Gfs-Gm-Af-Gm-Af-Am-Af-Cm- | 360 |
| | Gm-Cf-Cm-Gf-Um-Uf-Um-Cf-Um-Cf- | | Gf-Gm-Cf-Um-Gf-Cm-Uf-Um-Uf-Cm- | |
| | Cm-Uf | | Cf-Ams-Gfs-Cm | |
| B1612-AL | Afs-Ams-Gf-Cm-Af-Gm-Cf-Cm-Gf- | 275 | Ams-Cfs-Cm-Af-Am-Gf-Gm-Af-Gm-Af- | 361 |
| | Um-Uf-Um-Cf-Um-Cf-Cm-Uf-Um-Gf- | | Am-Af-Cm-Gf-Gm-Cf-Um-Gf-Cm-Uf- | |
| | Gm-Uf | | Ums-Ufs-Cm | |
| B1775-AL | Cfs-Ams-Af-Cm-Cf-Gm-Af-Cm-Cf- | 276 | Ums-Afs-Cm-Af-Am-Af-Cm-Af-Am-Gf- | 362 |
| | Am-Gf-Cm-Uf-Um-Gf-Um-Uf-Um-Gf- | | Cm-Uf-Gm-Gf-Um-Cf-Gm-Gf-Um-Uf- | |
| | Um-Af | | Gms-Gfs-Am | |
| B1790-AL | Ufs-Ums-Uf-Gm-Uf-Gm-Af-Am-Af- | 277 | Ams-Afs-Cm-Af-Cm-Uf-Um-Uf-Um-Uf- | 363 |
| | Cm-Af-Am-Af-Am-Af-Am-Gf-Um-Gf- | | Um-Gf-Um-Uf-Um-Cf-Am-Cf-Am-Af- | |
| | Um-Uf | | Ams-Cfs-Am | |
| B1796-AL | Afs-Ams-Af-Cm-Af-Am-Af-Am-Af- | 278 | Ams-Afs-Am-Gf-Gm-Gf-Am-Af-Cm- | 364 |
| | Am-Gf-Um-Gf-Um-Uf-Cm-Cf-Cm-Uf- | | Af-Cm-Uf-Um-Uf-Um-Uf-Um-Gf-Um- | |
| | Um-Uf | | Uf-Ums-Cfs-Am | |
| B1798s- | Ams-Cfs-Am-Af-Am-Af-Am-Af-Gm- | 279 | Ams-Afs-Am-Af-Gm-Gf-Gm-Af-Am- | 365 |
| AL | Uf-Gm-Uf-Um-Cf-Cm-Cf-Um-Uf-Um- | | Cf-Am-Cf-Um-Uf-Um-Uf-Um-Uf-Gm- | |
| | Uf | | Ufs-Ums-Uf | |
| B1799-AL | Cfs-Ams-Af-Am-Af-Am-Af-Gm-Uf- | 280 | Ums-Gfs-Am-Af-Am-Af-Gm-Gf-Gm- | 366 |
| | Gm-Uf-Um-Cf-Cm-Cf-Um-Uf-Um-Uf- | | Af-Am-Cf-Am-Cf-Um-Uf-Um-Uf-Um- | |
| | Cm-Af | | Uf-Gms-Ufs-Um | |
| B1810-AL | Ufs-Cms-Cf-Cm-Uf-Um-Uf-Um-Cf- | 281 | Ums-Gfs-Um-Uf-Cm-Uf-Cm-Af-Am-Cf- | 367 |
| | Am-Af-Gm-Uf-Um-Gf-Am-Gf-Am-Af- | | Um-Uf-Gm-Af-Am-Af-Am-Gf-Gm-Gf- | |
| | Cm-Af | | Ams-Afs-Cm | |
| B1811-AL | Cfs-Cms-Cf-Um-Uf-Um-Uf-Cm-Af- | 282 | Ums-Ufs-Gm-Uf-Um-Cf-Um-Cf-Am-Af- | 368 |
| | Am-Gf-Um-Uf-Gm-Af-Gm-Af-Am-Cf- | | Cm-Uf-Um-Gf-Am-Af-Am-Af-Gm-Gf- | |
| | Am-Af | | Gms-Afs-Am | |
| B1814-AL | Ufs-Ums-Uf-Um-Cf-Am-Af-Gm-Uf- | 283 | Ums-Ufs-Um-Uf-Um-Gf-Um-Uf-Cm- | 369 |
| | Um-Gf-Am-Gf-Am-Af-Cm-Af-Am-Af- | | Uf-Cm-Af-Am-Cf-Um-Uf-Gm-Af-Am- | |
| | Am-Af | | Af-Ams-Gfs-Gm | |
| B1815-AL | Ufs-Ums-Uf-Cm-Af-Am-Gf-Um-Uf- | 284 | Ams-Ufs-Um-Uf-Um-Uf-Gm-Uf-Um- | 370 |
| | Gm-Af-Gm-Af-Am-Cf-Am-Af-Am-Af- | | Cf-Um-Cf-Am-Af-Cm-Uf-Um-Gf-Am- | |
| | Am-Uf | | Af-Ams-Afs-Gm | |
| B1817-AL | Ufs-Cms-Af-Am-Gf-Um-Uf-Gm-Af- | 285 | Cms-Afs-Am-Uf-Um-Uf-Um-Uf-Gm- | 371 |
| | Gm-Af-Am-Cf-Am-Af-Am-Af-Am-Uf- | | Uf-Um-Cf-Um-Cf-Am-Af-Cm-Uf-Um- | |
| | Um-Gf | | Gf-Ams-Afs-Am | |
| B1828-AL | Afs-Cms-Af-Am-Af-Am-Af-Um-Uf- | 286 | Ams-Ufs-Um-Uf-Um-Af-Am-Af-Am- | 372 |
| | Gm-Gf-Gm-Uf-Um-Uf-Um-Af-Am-Af- | | Cf-Cm-Cf-Am-Af-Um-Uf-Um-Uf-Um- | |
| | Am-Uf | | Gf-Ums-Ufs-Cm | |
| B1838s- | Gms-Gfs-Um-Uf-Um-Uf-Am-Af-Am- | 287 | Ums-Afs-Um-Af-Cm-Uf-Um-Uf-Am- | 373 |
| AL | Af-Um-Uf-Am-Af-Am-Gf-Um-Af-Um- | | Af-Um-Uf-Um-Uf-Am-Af-Am-Af-Cm- | |
| | Af | | Cfs-Cms-Af | |
| B2018-AL | Afs-Ums-Af-Gm-Cf-Um-Gf-Gm-Uf- | 288 | Ams-Afs-Gm-Gf-Gm-Af-Gm-Af-Am- | 374 |
| | Um-Af-Um-Uf-Um-Cf-Um-Cf-Cm-Cf- | | Af-Um-Af-Am-Cf-Cm-Af-Gm-Cf-Um- | |
| | Um-Uf | | Af-Ums-Gfs-Gm | |
| B2020-AL | Afs-Gms-Cf-Um-Gf-Gm-Uf-Um-Af- | 289 | Ams-Cfs-Am-Af-Gm-Gf-Gm-Af-Gm- | 375 |
| | Um-Uf-Um-Cf-Um-Cf-Cm-Cf-Um-Uf- | | Af-Am-Af-Um-Af-Am-Cf-Cm-Af-Gm- | |
| | Gm-Uf | | Cf-Ums-Afs-Um | |
| B2025-AL | Gfs-Ums-Uf-Am-Uf-Um-Uf-Cm-Uf- | 290 | Ums-Ufs-Am-Af-Cm-Af-Cm-Af-Am-Gf- | 376 |
| | Cm-Cf-Cm-Uf-Um-Gf-Um-Gf-Um-Uf- | | Gm-Gf-Am-Gf-Am-Af-Am-Uf-Am-Af- | |
| | Am-Af | | Cms-Cfs-Am | |
| B2030-AL | Ufs-Ums-Cf-Um-Cf-Cm-Cf-Um-Uf- | 291 | Ums-Afs-Um-Uf-Am-Cf-Um-Af-Am-Cf- | 377 |
| | Gm-Uf-Gm-Uf-Um-Af-Gm-Uf-Am-Af- | | Am-Cf-Am-Af-Gm-Gf-Gm-Af-Gm-Af- | |
| | Um-Af | | Ams-Afs-Um | |
| B2031-AL | Ufs-Cms-Uf-Cm-Cf-Cm-Uf-Um-Gf- | 292 | Ums-Ufs-Am-Uf-Um-Af-Cm-Uf-Am- | 378 |
| | Um-Gf-Um-Uf-Am-Gf-Um-Af-Am-Uf- | | Af-Cm-Af-Cm-Af-Am-Gf-Gm-Gf-Am- | |
| | Am-Af | | Gf-Ams-Afs-Am | |
| B2032-AL | Cfs-Ums-Cf-Cm-Cf-Um-Uf-Gm-Uf- | 293 | Ums-Ufs-Um-Af-Um-Uf-Am-Cf-Um- | 379 |
| | Gm-Uf-Um-Af-Gm-Uf-Am-Af-Um-Af- | | Af-Am-Cf-Am-Cf-Am-Af-Gm-Gf-Gm- | |
| | Am-Af | | Af-Gms-Afs-Am | |
| B2033-AL | Ufs-Cms-Cf-Cm-Uf-Um-Gf-Um-Gf- | 294 | Ums-Ufs-Um-Uf-Am-Uf-Um-Af-Cm- | 380 |
| | Um-Uf-Am-Gf-Um-Af-Am-Uf-Am-Af- | | Uf-Am-Af-Cm-Af-Cm-Af-Am-Gf-Gm- | |
| | Am-Af | | Gf-Ams-Gfs-Am | |
| B729-AL | Afs-Gms-Af-Am-Cf-Um-Gf-Gm-Af- | 295 | Ums-Cfs-Am-Gf-Cm-Af-Gm-Cf-Am-Af- | 381 |
| | Um-Gf-Um-Uf-Gm-Cf-Um-Gf-Cm-Uf- | | Cm-Af-Um-Cf-Cm-Af-Gm-Uf-Um-Cf- | |
| | Gm-Af | | Ums-Gfs-Um | |
| B731-AL | Afs-Ams-Cf-Um-Gf-Gm-Af-Um-Gf- | 296 | Ums-Cfs-Um-Cf-Am-Gf-Cm-Af-Gm-Cf- | 382 |
| | Um-Uf-Gm-Cf-Um-Gf-Cm-Uf-Gm-Af- | | Am-Af-Cm-Af-Um-Cf-Cm-Af-Gm-Uf- | |
| | Gm-Af | | Ums-Cfs-Um | |
| B732-AL | Afs-Cms-Uf-Gm-Gf-Am-Uf-Gm-Uf- | 297 | Ums-Ufs-Cm-Uf-Cm-Af-Gm-Cf-Am-Gf- | 383 |
| | Um-Gf-Cm-Uf-Gm-Cf-Um-Gf-Am-Gf- | | Cm-Af-Am-Cf-Am-Uf-Cm-Cf-Am-Gf- | |
| | Am-Af | | Ums-Ufs-Cm | |
| B734-AL | Ufs-Gms-Gf-Am-Uf-Gm-Uf-Um-Gf- | 298 | Ums-Cfs-Um-Uf-Cm-Uf-Cm-Af-Gm-Cf- | 384 |
| | Cm-Uf-Gm-Cf-Um-Gf-Am-Gf-Am-Af- | | Am-Gf-Cm-Af-Am-Cf-Am-Uf-Cm-Cf- | |
| | Gm-Af | | Ams-Gfs-Um | |
| B734s-AL | Ums-Gfs-Gm-Af-Um-Gf-Um-Uf-Gm- | 299 | Ums-Ufs-Um-Cf-Um-Cf-Am-Gf-Cm-Af- | 385 |
| | Cf-Um-Gf-Cm-Uf-Gm-Af-Gm-Af-Am- | | Gm-Cf-Am-Af-Cm-Af-Um-Cf-Cm-Afs- | |
| | Af | | Gms-Uf | |
| B736-AL | Gfs-Ams-Uf-Gm-Uf-Um-Gf-Cm-Uf- | 300 | Ams-Afs-Um-Cf-Um-Uf-Cm-Uf-Cm-Af- | 386 |
| | Gm-Cf-Um-Gf-Am-Gf-Am-Af-Gm-Af- | | Gm-Cf-Am-Gf-Cm-Af-Am-Cf-Am-Uf- | |
| | Um-Uf | | Cms-Cfs-Am | |
| B743-AL | Cfs-Ums-Gf-Cm-Uf-Gm-Af-Gm-Af- | 301 | Ams-Cfs-Cm-Uf-Gm-Uf-Cm-Af-Am-Uf- | 387 |
| | Am-Gf-Am-Uf-Um-Gf-Am-Cf-Am-Gf- | | Cm-Uf-Um-Cf-Um-Cf-Am-Gf-Cm-Af- | |
| | Gm-Uf | | Gms-Cfs-Am | |
| B753s-AL | Gms-Afs-Um-Uf-Gm-Af-Cm-Af-Gm- | 302 | Ums-Cfs-Um-Gf-Cm-Af-Um-Gf-Am-Af- | 388 |
| | Gf-Um-Uf-Cm-Af-Um-Gf-Cm-Af-Gm- | | Cm-Cf-Um-Gf-Um-Cf-Am-Af-Um-Cfs- | |
| | Af | | Ums-Uf | |
| B963-AL | Gfs-Cms-Af-Cm-Uf-Gm-Gf-Am-Gf- | 303 | Ums-Cfs-Cm-Uf-Gm-Gf-Am-Uf-Gm-Uf- | 389 |
| | Um-Gf-Am-Cf-Am-Uf-Cm-Cf-Am-Gf- | | Cm-Af-Cm-Uf-Cm-Cf-Am-Gf-Um-Gf- | |
| | Gm-Af | | Cms-Ufs-Gm | |
| B966-AL | Cfs-Ums-Gf-Gm-Af-Gm-Uf-Gm-Af- | 304 | Ums-Ufs-Gm-Uf-Cm-Cf-Um-Gf-Gm-Af- | 390 |
| | Cm-Af-Um-Cf-Cm-Af-Gm-Gf-Am-Cf- | | Um-Gf-Um-Cf-Am-Cf-Um-Cf-Cm-Af- | |
| | Am-Af | | Gms-Ufs-Gm | |
| B969-AL | Gfs-Ams-Gf-Um-Gf-Am-Cf-Am-Uf- | 305 | Ams-Afs-Gm-Uf-Um-Gf-Um-Cf-Cm-Uf- | 391 |
| | Cm-Cf-Am-Gf-Gm-Af-Cm-Af-Am-Cf- | | Gm-Gf-Am-Uf-Gm-Uf-Cm-Af-Cm-Uf- | |
| | Um-Uf | | Cms-Cfs-Am | |
| B971-AL | Am-Gf-Gm-Af-Cm-Af-Am-Cf-Um-Uf- | 306 | Ams-Gfs-Am-Af-Gm-Uf-Um-Gf-Um- | 392 |
| | Gfs-Ums-Gf-Am-Cf-Am-Uf-Cm-Cf- | | Cf-Cm-Uf-Gm-Gf-Am-Uf-Gm-Uf-Cm- | |
| | Cm-Uf | | Af-Cms-Ufs-Cm | |
| B982-AL | Gfs-Ams-Cf-Am-Af-Cm-Uf-Um-Cf- | 307 | Ums-Ufs-Gm-Af-Gm-Uf-Cm-Af-Cm-Cf- | 393 |
| | Um-Cf-Gm-Gf-Um-Gf-Am-Cf-Um-Cf- | | Gm-Af-Gm-Af-Am-Gf-Um-Uf-Gm-Uf- | |
| | Am-Af | | Cms-Cfs-Um | |
| B984-AL | Cfs-Ams-Af-Cm-Uf-Um-Cf-Um-Cf- | 308 | Ams-Cfs-Um-Uf-Gm-Af-Gm-Uf-Cm-Af- | 394 |
| | Gm-Gf-Um-Gf-Am-Cf-Um-Cf-Am-Af- | | Cm-Cf-Gm-Af-Gm-Af-Am-Gf-Um-Uf- | |
| | Gm-Uf | | Gms-Ufs-Cm | |
| B992-AL | Cfs-Gms-Gf-Um-Gf-Am-Cf-Um-Cf- | 309 | Ums-Gfs-Am-Af-Gm-Gf-Gm-Cf-Am-Cf- | 395 |
| | Am-Af-Gm-Uf-Gm-Cf-Cm-Cf-Um-Uf- | | Um-Uf-Gm-Af-Gm-Uf-Cm-Af-Cm-Cf- | |
| | Cm-Af | | Gms-Afs-Gm | |
| B994-AL | Gfs-Ums-Gf-Am-Cf-Um-Cf-Am-Af- | 310 | Ams-Gfs-Um-Gf-Am-Af-Gm-Gf-Gm- | 396 |
| | Gm-Uf-Gm-Cf-Cm-Cf-Um-Uf-Cm-Af- | | Cf-Am-Cf-Um-Uf-Gm-Af-Gm-Uf-Cm- | |
| | Cm-Uf | | Af-Cms-Cfs-Gm | |
| C1835- | Ums-Ums-Gm-Gm-Gm-Um-Uf-Um- | 397 | UmsEVP-Afs-Cm-Uf-Uf-Uf-Am-Am- | 432 |
| DV29P | Uf-Am-Af-Am-Am-Um-Um-Am-Af- | | Um-Um-Um-Um-Am-Af-Am-Af-Cm- | |
| | Am-Gm-Um-Am | | Cm-Cm-Am-Ams-Ums-Um | |
| C1835- | Ums-Ums-Gm-Gm-Gm-Um-Uf-Um- | 398 | UmsEVP-Afs-Cf-Uf-Um-Uf-Am-Am- | 433 |
| DV26P | Uf-Af-Af-Am-Am-Um-Um-Am-Af- | | Um-Um-Um-Um-Am-Af-Am-Af-Cm- | |
| | Am-Gm-Um-Am | | Cm-Cm-Am-Ams-Ums-Um | |
| C1835- | Ums-Ums-Gm-Gm-Gm-Um-Uf-Um- | 398 | UmsEVP-Afs-Cm-Uf-Uf-Uf-Am-Am- | 432 |
| DV27P | Uf-Af-Af-Am-Am-Um-Um-Am-Af- | | Um-Um-Um-Um-Am-Af-Am-Af-Cm- | |
| | Am-Gm-Um-Am | | Cm-Cm-Am-Ams-Ums-Um | |
| C1835- | Ums-Ums-Gm-Gm-Gm-Um-Uf-Um- | 397 | UmsEVP-Afs-Cf-Uf-Um-Uf-Am-Am- | 433 |
| DV28P | Uf-Am-Af-Am-Am-Um-Um-Am-Af- | | Um-Um-Um-Um-Am-Af-Am-Af-Cm- | |
| | Am-Gm-Um-Am | | Cm-Cm-Am-Ams-Ums-Um | |
| C1835- | Ums-Ums-Gm-Gm-Gm-Um-Uf-Um- | 397 | UmsEVP-Afs-Cm-Um-Uf-Uf-Am-Am- | 434 |
| DV32P | Uf-Am-Af-Am-Am-Um-Um-Am-Af- | | Um-Um-Um-Um-Am-Af-Am-Af-Cm- | |
| | Am-Gm-Um-Am | | Cm-Cm-Am-Ams-Ums-Um | |
| C1835- | Ums-Ums-Gm-Gm-Gm-Um-Uf-Um- | 397 | UmsEVP-Afs-Cf-Um-Um-Uf-Am-Am- | 435 |
| DV34P | Uf-Am-Af-Am-Am-Um-Um-Am-Af- | | Um-Um-Um-Um-Am-Af-Am-Af-Cm- | |
| | Am-Gm-Um-Am | | Cm-Cm-Am-Ams-Ums-Um | |
| C1835- | Ums-Ums-Gm-Gm-Gm-Um-Uf-Um- | 398 | UmsEVP-Afs-Cm-Um-Um-Uf-Am-Am- | 436 |
| DV25P | Uf-Af-Af-Am-Am-Um-Um-Am-Af- | | Um-Um-Um-Um-Am-Af-Am-Af-Cm- | |
| | Am-Gm-Um-Am | | Cm-Cm-Am-Ams-Ums-Um | |
| C1835- | Ums-Ums-Gm-Gm-Gm-Um-Uf-Um- | 397 | UmsEVP-Afs-Cf-Um-Uf-Uf-Am-Am- | 437 |
| DV33P | Uf-Am-Af-Am-Am-Um-Um-Am-Af- | | Um-Um-Um-Um-Am-Af-Am-Af-Cm- | |
| | Am-Gm-Um-Am | | Cm-Cm-Am-Ams-Ums-Um | |
| C1835- | Ums-Ums-Gm-Gm-Gm-Um-Uf-Um- | 399 | Ums-Afs-Cm-Um-Um-Uf-Am-Am-Um- | 438 |
| DV22 | Uf-Af-Af-Am-Am-Um-Um-Am-Am- | | Um-Um-Um-Am-Af-Am-Af-Cm-Cm- | |
| | Am-Gm-Um-Am | | Cm-Am-Ams-Ums-Um | |
| C1816- | Ums-Ums-Cm-Am-Am-Gm-Uf-Um- | 400 | AmsEVP-Afs-Um-Uf-Uf-Uf-Um-Gm- | 439 |
| DV29P | Gf-Am-Gf-Am-Am-Cm-Am-Am-Af- | | Um-Um-Cm-Um-Cm-Af-Am-Cf-Um- | |
| | Am-Am-Um-Um | | Um-Gm-Am-Ams-Ams-Am | |
| C1816- | Ums-Ums-Cm-Am-Am-Gm-Uf-Um- | 401 | AmsEVP-Afs-Uf-Uf-Um-Uf-Um-Gm- | 440 |
| DV26P | Gf-Af-Gf-Am-Am-Cm-Am-Am-Af- | | Um-Um-Cm-Um-Cm-Af-Am-Cf-Um- | |
| | Am-Am-Um-Um | | Um-Gm-Am-Ams-Ams-Am | |
| C1816- | Ums-Ums-Cm-Am-Am-Gm-Uf-Um- | 401 | AmsEVP-Afs-Um-Uf-Uf-Uf-Um-Gm- | 439 |
| DV27P | Gf-Af-Gf-Am-Am-Cm-Am-Am-Af- | | Um-Um-Cm-Um-Cm-Af-Am-Cf-Um- | |
| | Am-Am-Um-Um | | Um-Gm-Am-Ams-Ams-Am | |
| C1816- | Ums-Ums-Cm-Am-Am-Gm-Uf-Um- | 400 | AmsEVP-Afs-Uf-Uf-Um-Uf-Um-Gm- | 440 |
| DV28P | Gf-Am-Gf-Am-Am-Cm-Am-Am-Af- | | Um-Um-Cm-Um-Cm-Af-Am-Cf-Um- | |
| | Am-Am-Um-Um | | Um-Gm-Am-Ams-Ams-Am | |
| C1816- | Ums-Ums-Cm-Am-Am-Gm-Uf-Um- | 400 | AmsEVP-Afs-Um-Um-Uf-Uf-Um-Gm- | 441 |
| DV32P | Gf-Am-Gf-Am-Am-Cm-Am-Am-Af- | | Um-Um-Cm-Um-Cm-Af-Am-Cf-Um- | |
| | Am-Am-Um-Um | | Um-Gm-Am-Ams-Ams-Am | |
| C1816- | Ums-Ums-Cm-Am-Am-Gm-Uf-Um- | 400 | AmsEVP-Afs-Uf-Um-Um-Uf-Um-Gm- | 442 |
| DV34P | Gf-Am-Gf-Am-Am-Cm-Am-Am-Af- | | Um-Um-Cm-Um-Cm-Af-Am-Cf-Um- | |
| | Am-Am-Um-Um | | Um-Gm-Am-Ams-Ams-Am | |
| C1816- | Ums-Ums-Cm-Am-Am-Gm-Uf-Um- | 401 | AmsEVP-Afs-Um-Um-Um-Uf-Um-Gm- | 443 |
| DV25P | Gf-Af-Gf-Am-Am-Cm-Am-Am-Af- | | Um-Um-Cm-Um-Cm-Af-Am-Cf-Um- | |
| | Am-Am-Um-Um | | Um-Gm-Am-Ams-Ams-Am | |
| C1816- | Ums-Ums-Cm-Am-Am-Gm-Uf-Um- | 400 | AmsEVP-Afs-Uf-Um-Uf-Uf-Um-Gm- | 444 |
| DV33P | Gf-Am-Gf-Am-Am-Cm-Am-Am-Af- | | Um-Um-Cm-Um-Cm-Af-Am-Cf-Um- | |
| | Am-Am-Um-Um | | Um-Gm-Am-Ams-Ams-Am | |
| C1816- | Ums-Ums-Cm-Am-Am-Gm-Uf-Um- | 402 | Ams-Afs-Um-Um-Um-Uf-Um-Gm-Um- | 445 |
| DV22 | Gf-Af-Gf-Am-Am-Cm-Am-Am-Am- | | Um-Cm-Um-Cm-Af-Am-Cf-Um-Um- | |
| | Am-Am-Um-Um | | Gm-Am-Ams-Ams-Am | |
| C1812- | Cms-Cms-Um-Um-Um-Um-Cf-Am- | 403 | UmsEVP-Ufs-Um-Gf-Uf-Uf-Cm-Um- | 446 |
| DV29P | Af-Gm-Uf-Um-Gm-Am-Gm-Am-Af- | | Cm-Am-Am-Cm-Um-Uf-Gm-Af-Am- | |
| | Cm-Am-Am-Am | | Am-Am-Gm-Gms-Gms-Am | |
| C1812- | Cms-Cms-Um-Um-Um-Um-Cf-Am- | 404 | UmsEVP-Ufs-Uf-Gf-Um-Uf-Cm-Um- | 447 |
| DV26P | Af-Gf-Uf-Um-Gm-Am-Gm-Am-Af- | | Cm-Am-Am-Cm-Um-Uf-Gm-Af-Am- | |
| | Cm-Am-Am-Am | | Am-Am-Gm-Gms-Gms-Am | |
| C1812- | Cms-Cms-Um-Um-Um-Um-Cf-Am- | 404 | UmsEVP-Ufs-Um-Gf-Uf-Uf-Cm-Um- | 446 |
| DV27P | Af-Gf-Uf-Um-Gm-Am-Gm-Am-Af- | | Cm-Am-Am-Cm-Um-Uf-Gm-Af-Am- | |
| | Cm-Am-Am-Am | | Am-Am-Gm-Gms-Gms-Am | |
| C1812- | Cms-Cms-Um-Um-Um-Um-Cf-Am- | 403 | UmsEVP-Ufs-Uf-Gf-Um-Uf-Cm-Um- | 447 |
| DV28P | Af-Gm-Uf-Um-Gm-Am-Gm-Am-Af- | | Cm-Am-Am-Cm-Um-Uf-Gm-Af-Am- | |
| | Cm-Am-Am-Am | | Am-Am-Gm-Gms-Gms-Am | |
| C1812- | Cms-Cms-Um-Um-Um-Um-Cf-Am- | 403 | UmsEVP-Ufs-Um-Gm-Uf-Uf-Cm-Um- | 448 |
| DV32P | Af-Gm-Uf-Um-Gm-Am-Gm-Am-Af- | | Cm-Am-Am-Cm-Um-Uf-Gm-Af-Am- | |
| | Cm-Am-Am-Am | | Am-Am-Gm-Gms-Gms-Am | |
| C1812- | Cms-Cms-Um-Um-Um-Um-Cf-Am- | 403 | UmsEVP-Ufs-Uf-Gm-Um-Uf-Cm-Um- | 449 |
| DV34P | Af-Gm-Uf-Um-Gm-Am-Gm-Am-Af- | | Cm-Am-Am-Cm-Um-Uf-Gm-Af-Am- | |
| | Cm-Am-Am-Am | | Am-Am-Gm-Gms-Gms-Am | |
| C1812- | Cms-Cms-Um-Um-Um-Um-Cf-Am- | 404 | UmsEVP-Ufs-Um-Gm-Um-Uf-Cm-Um- | 450 |
| DV25P | Af-Gf-Uf-Um-Gm-Am-Gm-Am-Af- | | Cm-Am-Am-Cm-Um-Uf-Gm-Af-Am- | |
| | Cm-Am-Am-Am | | Am-Am-Gm-Gms-Gms-Am | |
| C1812- | Cms-Cms-Um-Um-Um-Um-Cf-Am- | 403 | UmsEVP-Ufs-Uf-Gm-Uf-Uf-Cm-Um- | 451 |
| DV33P | Af-Gm-Uf-Um-Gm-Am-Gm-Am-Af- | | Cm-Am-Am-Cm-Um-Uf-Gm-Af-Am- | |
| | Cm-Am-Am-Am | | Am-Am-Gm-Gms-Gms-Am | |
| C1812- | Cms-Cms-Um-Um-Um-Um-Cf-Am- | 405 | Ums-Ufs-Um-Gm-Um-Uf-Cm-Um-Cm- | 452 |
| DV22 | Af-Gf-Uf-Um-Gm-Am-Gm-Am-Am- | | Am-Am-Cm-Um-Uf-Gm-Af-Am-Am- | |
| | Cm-Am-Am-Am | | Am-Gm-Gms-Gms-Am | |
| C1579- | Cms-Cms-Um-Um-Um-Um-Cf-Um- | 406 | UmsEVP-Cfs-Gm-Af-Cf-Uf-Cm-Am- | 453 |
| DV29P | Uf-Cm-Uf-Am-Am-Um-Gm-Am-Gf- | | Um-Um-Am-Gm-Am-Af-Gm-Af-Am- | |
| | Um-Cm-Gm-Am | | Am-Am-Gm-Gms-Ums-Gm | |
| C1579- | Cms-Cms-Um-Um-Um-Um-Cf-Um- | 407 | UmsEVP-Cfs-Gf-Af-Cm-Uf-Cm-Am- | 454 |
| DV26P | Uf-Cf-Uf-Am-Am-Um-Gm-Am-Gf- | | Um-Um-Am-Gm-Am-Af-Gm-Af-Am- | |
| | Um-Cm-Gm-Am | | Am-Am-Gm-Gms-Ums-Gm | |
| C1579- | Cms-Cms-Um-Um-Um-Um-Cf-Um- | 407 | UmsEVP-Cfs-Gm-Af-Cf-Uf-Cm-Am- | 453 |
| DV27P | Uf-Cf-Uf-Am-Am-Um-Gm-Am-Gf- | | Um-Um-Am-Gm-Am-Af-Gm-Af-Am- | |
| | Um-Cm-Gm-Am | | Am-Am-Gm-Gms-Ums-Gm | |
| C1579- | Cms-Cms-Um-Um-Um-Um-Cf-Um- | 406 | UmsEVP-Cfs-Gf-Af-Cm-Uf-Cm-Am- | 454 |
| DV28P | Uf-Cm-Uf-Am-Am-Um-Gm-Am-Gf- | | Um-Um-Am-Gm-Am-Af-Gm-Af-Am- | |
| | Um-Cm-Gm-Am | | Am-Am-Gm-Gms-Ums-Gm | |
| C1579- | Cms-Cms-Um-Um-Um-Um-Cf-Um- | 406 | UmsEVP-Cfs-Gm-Am-Cf-Uf-Cm-Am- | 455 |
| DV32P | Uf-Cm-Uf-Am-Am-Um-Gm-Am-Gf- | | Um-Um-Am-Gm-Am-Af-Gm-Af-Am- | |
| | Um-Cm-Gm-Am | | Am-Am-Gm-Gms-Ums-Gm | |
| C1579- | Cms-Cms-Um-Um-Um-Um-Cf-Um- | 406 | UmsEVP-Cfs-Gf-Am-Cm-Uf-Cm-Am- | 456 |
| DV34P | Uf-Cm-Uf-Am-Am-Um-Gm-Am-Gf- | | Um-Um-Am-Gm-Am-Af-Gm-Af-Am- | |
| | Um-Cm-Gm-Am | | Am-Am-Gm-Gms-Ums-Gm | |
| C1579- | Cms-Cms-Um-Um-Um-Um-Cf-Um- | 407 | UmsEVP-Cfs-Gm-Am-Cm-Uf-Cm-Am- | 457 |
| DV25P | Uf-Cf-Uf-Am-Am-Um-Gm-Am-Gf- | | Um-Um-Am-Gm-Am-Af-Gm-Af-Am- | |
| | Um-Cm-Gm-Am | | Am-Am-Gm-Gms-Ums-Gm | |
| C1579- | Cms-Cms-Um-Um-Um-Um-Cf-Um- | 406 | UmsEVP-Cfs-Gf-Am-Cf-Uf-Cm-Am- | 458 |
| DV33P | Uf-Cm-Uf-Am-Am-Um-Gm-Am-Gf- | | Um-Um-Am-Gm-Am-Af-Gm-Af-Am- | |
| | Um-Cm-Gm-Am | | Am-Am-Gm-Gms-Ums-Gm | |
| C1579- | Cms-Cms-Um-Um-Um-Um-Cf-Um- | 408 | Ums-Cfs-Gm-Am-Cm-Uf-Cm-Am-Um- | 459 |
| DV22 | Uf-Cf-Uf-Am-Am-Um-Gm-Am-Gm- | | Um-Am-Gm-Am-Af-Gm-Af-Am-Am- | |
| | Um-Cm-Gm-Am | | Am-Gm-Gms-Ums-Gm | |
| C1836- | Ums-Gms-Gm-Gm-Um-Um-Uf-Um- | 409 | AmsEVP-Ufs-Am-Cf-Uf-Uf-Um-Am- | 460 |
| DV29P | Af-Am-Af-Am-Um-Um-Am-Am-Af- | | Am-Um-Um-Um-Um-Af-Am-Af-Am- | |
| | Gm-Um-Am-Um | | Cm-Cm-Cm-Ams-Ams-Um | |
| C1836- | Ums-Gms-Gm-Gm-Um-Um-Uf-Um- | 410 | AmsEVP-Ufs-Af-Cf-Um-Uf-Um-Am- | 461 |
| DV26P | Af-Af-Af-Am-Um-Um-Am-Am-Af- | | Am-Um-Um-Um-Um-Af-Am-Af-Am- | |
| | Gm-Um-Am-Um | | Cm-Cm-Cm-Ams-Ams-Um | |
| C1836- | Ums-Gms-Gm-Gm-Um-Um-Uf-Um- | 410 | AmsEVP-Ufs-Am-Cf-Uf-Uf-Um-Am- | 460 |
| DV27P | Af-Af-Af-Am-Um-Um-Am-Am-Af- | | Am-Um-Um-Um-Um-Af-Am-Af-Am- | |
| | Gm-Um-Am-Um | | Cm-Cm-Cm-Ams-Ams-Um | |
| C1836- | Ums-Gms-Gm-Gm-Um-Um-Uf-Um- | 409 | AmsEVP-Ufs-Af-Cf-Um-Uf-Um-Am- | 461 |
| DV28P | Af-Am-Af-Am-Um-Um-Am-Am-Af- | | Am-Um-Um-Um-Um-Af-Am-Af-Am- | |
| | Gm-Um-Am-Um | | Cm-Cm-Cm-Ams-Ams-Um | |
| C1836- | Ums-Gms-Gm-Gm-Um-Um-Uf-Um- | 409 | AmsEVP-Ufs-Am-Cm-Uf-Uf-Um-Am- | 462 |
| DV32P | Af-Am-Af-Am-Um-Um-Am-Am-Af- | | Am-Um-Um-Um-Um-Af-Am-Af-Am- | |
| | Gm-Um-Am-Um | | Cm-Cm-Cm-Ams-Ams-Um | |
| C1836- | Ums-Gms-Gm-Gm-Um-Um-Uf-Um- | 409 | AmsEVP-Ufs-Af-Cm-Um-Uf-Um-Am- | 463 |
| DV34P | Af-Am-Af-Am-Um-Um-Am-Am-Af- | | Am-Um-Um-Um-Um-Af-Am-Af-Am- | |
| | Gm-Um-Am-Um | | Cm-Cm-Cm-Ams-Ams-Um | |
| C1789- | Gms-Ums-Um-Um-Gm-Um-Gf-Am- | 411 | AmsEVP-Cfs-Am-Cf-Uf-Uf-Um-Um- | 464 |
| DV29P | Af-Am-Cf-Am-Am-Am-Am-Am-Af- | | Um-Um-Gm-Um-Um-Uf-Cm-Af-Cm- | |
| | Gm-Um-Gm-Um | | Am-Am-Am-Cms-Ams-Am | |
| C1789- | Gms-Ums-Um-Um-Gm-Um-Gf-Am- | 412 | AmsEVP-Cfs-Af-Cf-Um-Uf-Um-Um- | 465 |
| DV26P | Af-Af-Cf-Am-Am-Am-Am-Am-Af- | | Um-Um-Gm-Um-Um-Uf-Cm-Af-Cm- | |
| | Gm-Um-Gm-Um | | Am-Am-Am-Cms-Ams-Am | |
| C1789- | Gms-Ums-Um-Um-Gm-Um-Gf-Am- | 412 | AmsEVP-Cfs-Am-Cf-Uf-Uf-Um-Um- | 464 |
| DV27P | Af-Af-Cf-Am-Am-Am-Am-Am-Af- | | Um-Um-Gm-Um-Um-Uf-Cm-Af-Cm- | |
| | Gm-Um-Gm-Um | | Am-Am-Am-Cms-Ams-Am | |
| C1789- | Gms-Ums-Um-Um-Gm-Um-Gf-Am- | 411 | AmsEVP-Cfs-Af-Cf-Um-Uf-Um-Um- | 465 |
| DV28P | Af-Am-Cf-Am-Am-Am-Am-Am-Af- | | Um-Um-Gm-Um-Um-Uf-Cm-Af-Cm- | |
| | Gm-Um-Gm-Um | | Am-Am-Am-Cms-Ams-Am | |
| C1789- | Gms-Ums-Um-Um-Gm-Um-Gf-Am- | 411 | AmsEVP-Cfs-Am-Cm-Uf-Uf-Um-Um- | 466 |
| DV32P | Af-Am-Cf-Am-Am-Am-Am-Am-Af- | | Um-Um-Gm-Um-Um-Uf-Cm-Af-Cm- | |
| | Gm-Um-Gm-Um | | Am-Am-Am-Cms-Ams-Am | |
| C1789- | Gms-Ums-Um-Um-Gm-Um-Gf-Am- | 411 | AmsEVP-Cfs-Af-Cm-Um-Uf-Um-Um- | 467 |
| DV34P | Af-Am-Cf-Am-Am-Am-Am-Am-Af- | | Um-Um-Gm-Um-Um-Uf-Cm-Af-Cm- | |
| | Gm-Um-Gm-Um | | Am-Am-Am-Cms-Ams-Am | |
| C1789- | Gms-Ums-Um-Um-Gm-Um-Gf-Am- | 412 | AmsEVP-Cfs-Am-Cm-Um-Uf-Um-Um- | 468 |
| DV25P | Af-Af-Cf-Am-Am-Am-Am-Am-Af- | | Um-Um-Gm-Um-Um-Uf-Cm-Af-Cm- | |
| | Gm-Um-Gm-Um | | Am-Am-Am-Cms-Ams-Am | |
| C1789- | Gms-Ums-Um-Um-Gm-Um-Gf-Am- | 411 | AmsEVP-Cfs-Af-Cm-Uf-Uf-Um-Um- | 469 |
| DV33P | Af-Am-Cf-Am-Am-Am-Am-Am-Af- | | Um-Um-Gm-Um-Um-Uf-Cm-Af-Cm- | |
| | Gm-Um-Gm-Um | | Am-Am-Am-Cms-Ams-Am | |
| C1789- | Gms-Ums-Um-Um-Gm-Um-Gf-Am- | 413 | Ams-Cfs-Am-Cm-Um-Uf-Um-Um-Um- | 470 |
| DV22 | Af-Af-Cf-Am-Am-Am-Am-Am-Am- | | Um-Gm-Um-Um-Uf-Cm-Af-Cm-Am- | |
| | Gm-Um-Gm-Um | | Am-Am-Cms-Ams-Am | |
| C1839- | Gms-Ums-Um-Um-Um-Am-Af-Am- | 414 | UmsEVP-Gfs-Um-Af-Uf-Af-Cm-Um- | 471 |
| DV29P | Af-Um-Uf-Am-Am-Am-Gm-Um-Af- | | Um-Um-Am-Am-Um-Uf-Um-Uf-Am- | |
| | Um-Am-Cm-Am | | Am-Am-Am-Cms-Cms-Cm | |
| C1839- | Gms-Ums-Um-Um-Um-Am-Af-Am- | 415 | UmsEVP-Gfs-Uf-Af-Um-Af-Cm-Um- | 472 |
| DV26P | Af-Uf-Uf-Am-Am-Am-Gm-Um-Af- | | Um-Um-Am-Am-Um-Uf-Um-Uf-Am- | |
| | Um-Am-Cm-Am | | Am-Am-Am-Cms-Cms-Cm | |
| C1839- | Gms-Ums-Um-Um-Um-Am-Af-Am- | 415 | UmsEVP-Gfs-Um-Af-Uf-Af-Cm-Um- | 471 |
| DV27P | Af-Uf-Uf-Am-Am-Am-Gm-Um-Af- | | Um-Um-Am-Am-Um-Uf-Um-Uf-Am- | |
| | Um-Am-Cm-Am | | Am-Am-Am-Cms-Cms-Cm | |
| C1839- | Gms-Ums-Um-Um-Um-Am-Af-Am- | 414 | UmsEVP-Gfs-Uf-Af-Um-Af-Cm-Um- | 472 |
| DV28P | Af-Um-Uf-Am-Am-Am-Gm-Um-Af- | | Um-Um-Am-Am-Um-Uf-Um-Uf-Am- | |
| | Um-Am-Cm-Am | | Am-Am-Am-Cms-Cms-Cm | |
| C1839- | Gms-Ums-Um-Um-Um-Am-Af-Am- | 414 | UmsEVP-Gfs-Um-Am-Uf-Af-Cm-Um- | 473 |
| DV32P | Af-Um-Uf-Am-Am-Am-Gm-Um-Af- | | Um-Um-Am-Am-Um-Uf-Um-Uf-Am- | |
| | Um-Am-Cm-Am | | Am-Am-Am-Cms-Cms-Cm | |
| C1839- | Gms-Ums-Um-Um-Um-Am-Af-Am- | 414 | UmsEVP-Gfs-Uf-Am-Um-Af-Cm-Um- | 474 |
| DV34P | Af-Um-Uf-Am-Am-Am-Gm-Um-Af- | | Um-Um-Am-Am-Um-Uf-Um-Uf-Am- | |
| | Um-Am-Cm-Am | | Am-Am-Am-Cms-Cms-Cm | |
| C1791- | Ums-Ums-Gm-Um-Gm-Am-Af-Am- | 416 | UmsEVP-Afs-Am-Cf-Af-Cf-Um-Um- | 475 |
| DV29P | Cf-Am-Af-Am-Am-Am-Am-Gm-Uf- | | Um-Um-Um-Um-Gm-Uf-Um-Uf-Cm- | |
| | Gm-Um-Um-Am | | Am-Cm-Am-Ams-Ams-Cm | |
| C1791- | Ums-Ums-Gm-Um-Gm-Am-Af-Am- | 417 | UmsEVP-Afs-Af-Cf-Am-Cf-Um-Um- | 476 |
| DV26P | Cf-Af-Af-Am-Am-Am-Am-Gm-Uf- | | Um-Um-Um-Um-Gm-Uf-Um-Uf-Cm- | |
| | Gm-Um-Um-Am | | Am-Cm-Am-Ams-Ams-Cm | |
| C1791- | Ums-Ums-Gm-Um-Gm-Am-Af-Am- | 417 | UmsEVP-Afs-Am-Cf-Af-Cf-Um-Um- | 475 |
| DV27P | Cf-Af-Af-Am-Am-Am-Am-Gm-Uf- | | Um-Um-Um-Um-Gm-Uf-Um-Uf-Cm- | |
| | Gm-Um-Um-Am | | Am-Cm-Am-Ams-Ams-Cm | |
| C1791- | Ums-Ums-Gm-Um-Gm-Am-Af-Am- | 416 | UmsEVP-Afs-Af-Cf-Am-Cf-Um-Um- | 476 |
| DV28P | Cf-Am-Af-Am-Am-Am-Am-Gm-Uf- | | Um-Um-Um-Um-Gm-Uf-Um-Uf-Cm- | |
| | Gm-Um-Um-Am | | Am-Cm-Am-Ams-Ams-Cm | |
| C1791- | Ums-Ums-Gm-Um-Gm-Am-Af-Am- | 416 | UmsEVP-Afs-Am-Cm-Af-Cf-Um-Um- | 477 |
| DV32P | Cf-Am-Af-Am-Am-Am-Am-Gm-Uf- | | Um-Um-Um-Um-Gm-Uf-Um-Uf-Cm- | |
| | Gm-Um-Um-Am | | Am-Cm-Am-Ams-Ams-Cm | |
| C1791- | Ums-Ums-Gm-Um-Gm-Am-Af-Am- | 416 | UmsEVP-Afs-Af-Cm-Am-Cf-Um-Um- | 478 |
| DV34P | Cf-Am-Af-Am-Am-Am-Am-Gm-Uf- | | Um-Um-Um-Um-Gm-Uf-Um-Uf-Cm- | |
| | Gm-Um-Um-Am | | Am-Cm-Am-Ams-Ams-Cm | |
| C1795- | Gms-Ams-Am-Am-Cm-Am-Af-Am- | 418 | AmsEVP-Afs-Gm-Gf-Gf-Af-Am-Cm- | 479 |
| DV29P | Af-Am-Af-Gm-Um-Gm-Um-Um-Cf- | | Am-Cm-Um-Um-Um-Uf-Um-Uf-Gm- | |
| | Cm-Cm-Um-Um | | Um-Um-Um-Cms-Ams-Cm | |
| C1795- | Gms-Ams-Am-Am-Cm-Am-Af-Am- | 419 | AmsEVP-Afs-Gf-Gf-Gm-Af-Am-Cm- | 480 |
| DV26P | Af-Af-Af-Gm-Um-Gm-Um-Um-Cf- | | Am-Cm-Um-Um-Um-Uf-Um-Uf-Gm- | |
| | Cm-Cm-Um-Um | | Um-Um-Um-Cms-Ams-Cm | |
| C1795- | Gms-Ams-Am-Am-Cm-Am-Af-Am- | 419 | AmsEVP-Afs-Gm-Gf-Gf-Af-Am-Cm- | 479 |
| DV27P | Af-Af-Af-Gm-Um-Gm-Um-Um-Cf- | | Am-Cm-Um-Um-Um-Uf-Um-Uf-Gm- | |
| | Cm-Cm-Um-Um | | Um-Um-Um-Cms-Ams-Cm | |
| C1795- | Gms-Ams-Am-Am-Cm-Am-Af-Am- | 418 | AmsEVP-Afs-Gf-Gf-Gm-Af-Am-Cm- | 480 |
| DV28P | Af-Am-Af-Gm-Um-Gm-Um-Um-Cf- | | Am-Cm-Um-Um-Um-Uf-Um-Uf-Gm- | |
| | Cm-Cm-Um-Um | | Um-Um-Um-Cms-Ams-Cm | |
| C1795- | Gms-Ams-Am-Am-Cm-Am-Af-Am- | 418 | AmsEVP-Afs-Gm-Gm-Gf-Af-Am-Cm- | 481 |
| DV32P | Af-Am-Af-Gm-Um-Gm-Um-Um-Cf- | | Am-Cm-Um-Um-Um-Uf-Um-Uf-Gm- | |
| | Cm-Cm-Um-Um | | Um-Um-Um-Cms-Ams-Cm | |
| C1795- | Gms-Ams-Am-Am-Cm-Am-Af-Am- | 418 | AmsEVP-Afs-Gf-Gm-Gm-Af-Am-Cm- | 482 |
| DV34P | Af-Am-Af-Gm-Um-Gm-Um-Um-Cf- | | Am-Cm-Um-Um-Um-Uf-Um-Uf-Gm- | |
| | Cm-Cm-Um-Um | | Um-Um-Um-Cms-Ams-Cm | |
| C1585s- | Cms-Ums-Um-Cm-Um-Af-Am-Uf- | 420 | UmsEVP-Afs-Am-Af-Gf-Uf-Cm-Gm- | 483 |
| DV29P | Gm-Af-Gm-Um-Cm-Gm-Am-Cf-Um- | | Am-Cm-Um-Cm-Am-Uf-Um-Af-Gm- | |
| | Um-Um-Am | | Am-Am-Gms-Ams-Am | |
| C1585s- | Cms-Ums-Um-Cm-Um-Af-Am-Uf-Gf- | 421 | UmsEVP-Afs-Af-Af-Gm-Uf-Cm-Gm- | 484 |
| DV26P | Af-Gm-Um-Cm-Gm-Am-Cf-Um-Um- | | Am-Cm-Um-Cm-Am-Uf-Um-Af-Gm- | |
| | Um-Am | | Am-Am-Gms-Ams-Am | |
| C1585s- | Cms-Ums-Um-Cm-Um-Af-Am-Uf-Gf- | 421 | UmsEVP-Afs-Am-Af-Gf-Uf-Cm-Gm- | 483 |
| DV27P | Af-Gm-Um-Cm-Gm-Am-Cf-Um-Um- | | Am-Cm-Um-Cm-Am-Uf-Um-Af-Gm- | |
| | Um-Am | | Am-Am-Gms-Ams-Am | |
| C1585s- | Cms-Ums-Um-Cm-Um-Af-Am-Uf- | 420 | UmsEVP-Afs-Af-Af-Gm-Uf-Cm-Gm- | 484 |
| DV28P | Gm-Af-Gm-Um-Cm-Gm-Am-Cf-Um- | | Am-Cm-Um-Cm-Am-Uf-Um-Af-Gm- | |
| | Um-Um-Am | | Am-Am-Gms-Ams-Am | |
| C1585s- | Cms-Ums-Um-Cm-Um-Af-Am-Uf- | 420 | UmsEVP-Afs-Am-Am-Gf-Uf-Cm-Gm- | 485 |
| DV32P | Gm-Af-Gm-Um-Cm-Gm-Am-Cf-Um- | | Am-Cm-Um-Cm-Am-Uf-Um-Af-Gm- | |
| | Um-Um-Am | | Am-Am-Gms-Ams-Am | |
| C1585s- | Cms-Ums-Um-Cm-Um-Af-Am-Uf- | 420 | UmsEVP-Afs-Af-Am-Gm-Uf-Cm-Gm- | 486 |
| DV34P | Gm-Af-Gm-Um-Cm-Gm-Am-Cf-Um- | | Am-Cm-Um-Cm-Am-Uf-Um-Af-Gm- | |
| | Um-Um-Am | | Am-Am-Gms-Ams-Am | |
| C1585s- | Cms-Ums-Um-Cm-Um-Af-Am-Uf-Gf- | 422 | Ums-Afs-Am-Am-Gm-Uf-Cm-Gm-Am- | 487 |
| DV22 | Af-Gm-Um-Cm-Gm-Am-Cm-Um-Um- | | Cm-Um-Cm-Am-Uf-Um-Af-Gm-Am- | |
| | Um-Am | | Am-Gms-Ams-Am | |
| C1576s- | Cms-Cms-Am-Cm-Cm-Uf-Um-Uf- | 423 | UmsEVP-Ufs-Cm-Af-Uf-Uf-Am-Gm- | 488 |
| DV29P | Um-Cf-Um-Um-Cm-Um-Am-Af-Um- | | Am-Am-Gm-Am-Am-Af-Am-Gf-Gm- | |
| | Gm-Am-Am | | Um-Gm-Gms-Gms-Am | |
| C1576s- | Cms-Cms-Am-Cm-Cm-Uf-Um-Uf- | 423 | UmsEVP-Ufs-Cf-Af-Um-Uf-Am-Gm- | 489 |
| DV28P | Um-Cf-Um-Um-Cm-Um-Am-Af-Um- | | Am-Am-Gm-Am-Am-Af-Am-Gf-Gm- | |
| | Gm-Am-Am | | Um-Gm-Gms-Gms-Am | |
| C1576s- | Cms-Cms-Am-Cm-Cm-Uf-Um-Uf-Uf- | 424 | UmsEVP-Ufs-Cf-Af-Um-Uf-Am-Gm- | 489 |
| DV26P | Cf-Um-Um-Cm-Um-Am-Af-Um-Gm- | | Am-Am-Gm-Am-Am-Af-Am-Gf-Gm- | |
| | Am-Am | | Um-Gm-Gms-Gms-Am | |
| C1576s- | Cms-Cms-Am-Cm-Cm-Uf-Um-Uf-Uf- | 424 | UmsEVP-Ufs-Cm-Am-Um-Uf-Am-Gm- | 490 |
| DV25P | Cf-Um-Um-Cm-Um-Am-Af-Um-Gm- | | Am-Am-Gm-Am-Am-Af-Am-Gf-Gm- | |
| | Am-Am | | Um-Gm-Gms-Gms-Am | |
| C1576s- | Cms-Cms-Am-Cm-Cm-Uf-Um-Uf-Uf- | 424 | UmsEVP-Ufs-Cm-Af-Uf-Uf-Am-Gm- | 488 |
| DV27P | Cf-Um-Um-Cm-Um-Am-Af-Um-Gm- | | Am-Am-Gm-Am-Am-Af-Am-Gf-Gm- | |
| | Am-Am | | Um-Gm-Gms-Gms-Am | |
| C1576s- | Cms-Cms-Am-Cm-Cm-Uf-Um-Uf-Uf- | 425 | Ums-Ufs-Cm-Am-Um-Uf-Am-Gm-Am- | 491 |
| DV22 | Cf-Um-Um-Cm-Um-Am-Am-Um-Gm- | | Am-Gm-Am-Am-Af-Am-Gf-Gm-Um- | |
| | Am-Am | | Gm-Gms-Gms-Am | |
| C1578s- | Ams-Cms-Cm-Um-Um-Uf-Um-Cf- | 426 | UmsEVP-Afs-Cm-Uf-Cf-Af-Um-Um- | 492 |
| DV29P | Um-Uf-Cm-Um-Am-Am-Um-Gf-Am- | | Am-Gm-Am-Am-Gm-Af-Am-Af-Am- | |
| | Gm-Um-Am | | Gm-Gm-Ums-Gms-Gm | |
| C1578s- | Ams-Cms-Cm-Um-Um-Uf-Um-Cf- | 426 | UmsEVP-Afs-Cf-Uf-Cm-Af-Um-Um- | 493 |
| DV28P | Um-Uf-Cm-Um-Am-Am-Um-Gf-Am- | | Am-Gm-Am-Am-Gm-Af-Am-Af-Am- | |
| | Gm-Um-Am | | Gm-Gm-Ums-Gms-Gm | |
| C1578s- | Ams-Cms-Cm-Um-Um-Uf-Um-Cf-Uf- | 427 | UmsEVP-Afs-Cf-Uf-Cm-Af-Um-Um- | 493 |
| DV26P | Uf-Cm-Um-Am-Am-Um-Gf-Am-Gm- | | Am-Gm-Am-Am-Gm-Af-Am-Af-Am- | |
| | Um-Am | | Gm-Gm-Ums-Gms-Gm | |
| C1578s- | Ams-Cms-Cm-Um-Um-Uf-Um-Cf-Uf- | 427 | UmsEVP-Afs-Cm-Um-Cm-Af-Um-Um- | 494 |
| DV25P | Uf-Cm-Um-Am-Am-Um-Gf-Am-Gm- | | Am-Gm-Am-Am-Gm-Af-Am-Af-Am- | |
| | Um-Am | | Gm-Gm-Ums-Gms-Gm | |
| C1578s- | Ams-Cms-Cm-Um-Um-Uf-Um-Cf-Uf- | 427 | UmsEVP-Afs-Cm-Uf-Cf-Af-Um-Um- | 492 |
| DV27P | Uf-Cm-Um-Am-Am-Um-Gf-Am-Gm- | | Am-Gm-Am-Am-Gm-Af-Am-Af-Am- | |
| | Um-Am | | Gm-Gm-Ums-Gms-Gm | |
| C1578s- | Ams-Cms-Cm-Um-Um-Uf-Um-Cf-Uf- | 428 | Ums-Afs-Cm-Um-Cm-Af-Um-Um-Am- | 495 |
| DV22 | Uf-Cm-Um-Am-Am-Um-Gm-Am-Gm- | | Gm-Am-Am-Gm-Af-Am-Af-Am-Gm- | |
| | Um-Am | | Gm-Ums-Gms-Gm | |
| C1838- | Gms-Gms-Um-Um-Um-Um-Af-Am- | 429 | UmsEVP-Ufs-Am-Uf-Af-Cf-Um-Um- | 496 |
| DV29P | Af-Am-Uf-Um-Am-Am-Am-Gm-Uf- | | Um-Am-Am-Um-Um-Uf-Um-Af-Am- | |
| | Am-Um-Am-Am | | Am-Am-Cm-Cms-Cms-Am | |
| C1838- | Gms-Gms-Um-Um-Um-Um-Af-Am- | 429 | UmsEVP-Ufs-Af-Uf-Am-Cf-Um-Um- | 497 |
| DV28P | Af-Am-Uf-Um-Am-Am-Am-Gm-Uf- | | Um-Am-Am-Um-Um-Uf-Um-Af-Am- | |
| | Am-Um-Am-Am | | Am-Am-Cm-Cms-Cms-Am | |
| C1838- | Gms-Gms-Um-Um-Um-Um-Af-Am- | 430 | UmsEVP-Ufs-Af-Uf-Am-Cf-Um-Um- | 497 |
| DV26P | Af-Af-Uf-Um-Am-Am-Am-Gm-Uf- | | Um-Am-Am-Um-Um-Uf-Um-Af-Am- | |
| | Am-Um-Am-Am | | Am-Am-Cm-Cms-Cms-Am | |
| C1838- | Gms-Gms-Um-Um-Um-Um-Af-Am- | 430 | UmsEVP-Ufs-Am-Um-Am-Cf-Um-Um- | 498 |
| DV25P | Af-Af-Uf-Um-Am-Am-Am-Gm-Uf- | | Um-Am-Am-Um-Um-Uf-Um-Af-Am- | |
| | Am-Um-Am-Am | | Am-Am-Cm-Cms-Cms-Am | |
| C1838- | Gms-Gms-Um-Um-Um-Um-Af-Am- | 430 | UmsEVP-Ufs-Am-Uf-Af-Cf-Um-Um- | 496 |
| DV27P | Af-Af-Uf-Um-Am-Am-Am-Gm-Uf- | | Um-Am-Am-Um-Um-Uf-Um-Af-Am- | |
| | Am-Um-Am-Am | | Am-Am-Cm-Cms-Cms-Am | |
| C1838- | Gms-Gms-Um-Um-Um-Um-Af-Am- | 431 | Ums-Ufs-Am-Um-Am-Cf-Um-Um-Um- | 499 |
| DV22 | Af-Af-Uf-Um-Am-Am-Am-Gm-Um- | | Am-Am-Um-Um-Uf-Um-Af-Am-Am- | |
| | Am-Um-Am-Am | | Am-Cm-Cms-Cms-Am | |
| 579P | ACCUUUUCUUCUAAUGAGUCU | 500 | AGACUCAUUAGAAGAAAAGGUGG | 513 |
| 789P | UUUGUGAAACAAAAAAGUGA | 501 | UCACUUUUUUGUUUCACAAACA | 514 |
| 812P | UUGUUCUCAACUUGAAAAGGGA | 502 | CCUUUUCAAGUUGAGAACAA | 515 |
| 576P | CCACCUUUUCUUCUAAUGAGU | 503 | ACUCAUUAGAAGAAAAGGUGGGA | 516 |
| 578P | CACCUUUUCUUCUAAUGAGUA | 504 | UACUCAUUAGAAGAAAAGGUGGG | 517 |
| 585P | UUCUAAUGAGUCGACUUUA | 505 | UAAAGUCGACUCAUUAGAA | 518 |
| AD-60771 | AGAACAAAAAUUGGGUUUUAA | 506 | UUAAAACCCAAUUUUUGUUCUCA | 519 |
| AD-85481 | GUCAUCCACAAUGAGAGUACA | 507 | UGUACUCUCAUUGUGGAUGACGA | 520 |
| 816P | UCAAGUUGAGAACAAAAAUA | 508 | UAUUUUUGUUCUCAACUUGAAA | 521 |
| 835P | GGGUUUUAAAAUUAAAGUAUA | 509 | UACUUUAAUUUUAAAACCCAA | 522 |
| 836P | GGUUUUAAAAUUAAAGUAUAC | 510 | AUACUUUAAUUUUAAAACCCA | 523 |
| 839P | GUUUUAAAAUUAAAGUAUACA | 511 | UAUACUUUAAUUUUAAAACCC | 524 |
| 791P | UUGUGAAACAAAAAAGUGUUU | 512 | ACACUUUUUUGUUUCACAAUU | 525 |
| D835- | Ums-Ums-Gm-Gm-Gm-Um-Uf-Um- | 398 | UmsEVP-Afs-Cf-Uf-Um-Uf-Am-Am- | 433 |
| DV26P | Uf-Af-Af-Am-Am-Um-Um-Am-Af- | | Um-Um-Um-Um-Am-Af-Am-Af-Cm- | |
| | Am-Gm-Um-Am | | Cm-Cm-Am-Ams-Ums-Um | |
| D835- | Ums-Ums-Gm-Gm-Gm-Um-Uf-Um- | 398 | UmsEVP-Afs-Cf-Uf-Um-Tgna-Am-Am- | 564 |
| DV26P+ | Uf-Af-Af-Am-Am-Um-Um-Am-Af- | | Um-Um-Um-Um-Am-Af-Am-Af-Cm- | |
| | Am-Gm-Um-Am | | Cm-Cm-Am-Ams-Ums-Um | |
| D835- | Ums-Ums-Gm-Gm-Gm-Um-Uf-Um- | 526 | UmsEVP-Afs-Cf-Uf-Um-Uf-Ad-Am- | 565 |
| DV26Pd7 | Uf-Af-Af-Am-Am-Um-Td-Am-Af- | | Um-Um-Um-Um-Am-Af-Am-Af-Cm- | |
| B | Am-Gm-Um-Am | | Cm-Cm-Am-Ams-Ums-Um | |
| D835- | Ums-Ums-Gm-Gm-Gm-Um-Uf-Um- | 527 | UmsEVP-Afs-Cf-Uf-Um-Td-Ad-Am- | 566 |
| DV26Pd67 | Uf-Af-Af-Am-Am-Um-Td-Ad-Af-Am- | | Um-Um-Um-Um-Am-Af-Am-Af-Cm- | |
| B | Gm-Um-Am | | Cm-Cm-Am-Ams-Ums-Um | |
| D578s- | Ams-Cms-Cm-Um-Um-Uf-Um-Cf- | 426 | UmsEVP-Afs-Cm-Uf-Cf-Agna-Um-Um- | 567 |
| DV29P+ | Um-Uf-Cm-Um-Am-Am-Um-Gf-Am- | | Am-Gm-Am-Am-Gm-Af-Am-Af-Am- | |
| | Gm-Um-Am | | Gm-Gm-Ums-Gms-Gm | |
| D578s- | Ams-Cms-Cm-Um-Um-Uf-Um-Cf- | 528 | UmsEVP-Afs-Cm-Uf-Cf-Ad-Td-Um- | 568 |
| DV29Pd67 | Um-Uf-Cm-Um-Am-Ad-Td-Gf-Am- | | Am-Gm-Am-Am-Gm-Af-Am-Af-Am- | |
| B | Gm-Um-Am | | Gm-Gm-Ums-Gms-Gm | |
| D578s- | Ams-Cms-Cm-Um-Um-Uf-Um-Cf- | 529 | UmsEVP-Afs-Cm-Uf-Cf-Af-Td-Um- | 569 |
| DV29Pd7 | Um-Uf-Cm-Um-Am-Ad-Um-Gf-Am- | | Am-Gm-Am-Am-Gm-Af-Am-Af-Am- | |
| B | Gm-Um-Am | | Gm-Gm-Ums-Gms-Gm | |
| D579- | Cms-Cms-Um-Um-Um-Um-Cf-Um- | 530 | UmsEVP-Cfs-Gm-Am-Cm-Uf-Cm-Am- | 457 |
| DV25PG5 | Uf-Cf-Uf-Am-Am-Um-Gm-Am-Gf- | | Um-Um-Am-Gm-Am-Af-Gm-Af-Am- | |
| | Um-Cm-Gm-Am-G5 | | Am-Am-Gm-Gms-Ums-Gm | |
| D579- | Cms-Cms-Um-Um-Um-Um-Cf-Um- | 531 | UmsEVP-Cfs-Gm-Am-Cm-Uf-Cd-Am- | 570 |
| DV25Pd7 | Uf-Cf-Uf-Am-Am-Um-Gd-Am-Gf- | | Um-Um-Am-Gm-Am-Af-Gm-Af-Am- | |
| BG5 | Um-Cm-Gm-Am-G5 | | Am-Am-Gm-Gms-Ums-Gm | |
| D579- | Cms-Cms-Um-Um-Um-Um-Cf-Um- | 532 | UmsEVP-Cfs-Gm-Am-Cm-Td-Cd-Am- | 571 |
| DV25Pd67 | Uf-Cf-Uf-Am-Am-Um-Gd-Ad-Gf-Um- | | Um-Um-Am-Gm-Am-Af-Gm-Af-Am- | |
| BG5 | Cm-Gm-Am-G5 | | Am-Am-Gm-Gms-Ums-Gm | |
| D789- | Gms-Ums-Um-Um-Gm-Um-Gf-Am- | 533 | AmsEVP-Cfs-Af-Cf-Um-Uf-Um-Um- | 465 |
| DV26PG5 | Af-Af-Cf-Am-Am-Am-Am-Am-Af- | | Um-Um-Gm-Um-Um-Uf-Cm-Af-Cm- | |
| | Gm-Um-Gm-Um-G5 | | Am-Am-Am-Cms-Ams-Am | |
| D789- | Gms-Ums-Um-Um-Gm-Um-Gf-Am- | 533 | AmsEVP-Cfs-Am-Cm-Um-Uf-Um-Um- | 468 |
| DV25PG5 | Af-Af-Cf-Am-Am-Am-Am-Am-Af- | | Um-Um-Gm-Um-Um-Uf-Cm-Af-Cm- | |
| | Gm-Um-Gm-Um-G5 | | Am-Am-Am-Cms-Ams-Am | |
| D789- | Gms-Ums-Um-Um-Gm-Um-Gf-Am- | 534 | AmsEVP-Cfs-Af-Cf-Um-Uf-Td-Um- | 572 |
| DV26Pd7 | Af-Af-Cf-Am-Am-Am-Ad-Am-Af- | | Um-Um-Gm-Um-Um-Uf-Cm-Af-Cm- | |
| BG5 | Gm-Um-Gm-Um-G5 | | Am-Am-Am-Cms-Ams-Am | |
| D789- | Gms-Ums-Um-Um-Gm-Um-Gf-Am- | 534 | AmsEVP-Cfs-Am-Cm-Um-Uf-Td-Um- | 573 |
| DV25Pd7 | Af-Af-Cf-Am-Am-Am-Ad-Am-Af- | | Um-Um-Gm-Um-Um-Uf-Cm-Af-Cm- | |
| BG5 | Gm-Um-Gm-Um-G5 | | Am-Am-Am-Cms-Ams-Am | |
| D789- | Gms-Ums-Um-Um-Gm-Um-Gf-Am- | 535 | AmsEVP-Cfs-Af-Cf-Um-Td-Td-Um- | 574 |
| DV26Pd67 | Af-Af-Cf-Am-Am-Am-Ad-Ad-Af- | | Um-Um-Gm-Um-Um-Uf-Cm-Af-Cm- | |
| BG5 | Gm-Um-Gm-Um-G5 | | Am-Am-Am-Cms-Ams-Am | |
| D789- | Gms-Ums-Um-Um-Gm-Um-Gf-Am- | 535 | AmsEVP-Cfs-Am-Cm-Um-Td-Td-Um- | 575 |
| DV25Pd67 | Af-Af-Cf-Am-Am-Am-Ad-Ad-Af-Gm- | | Um-Um-Gm-Um-Um-Uf-Cm-Af-Cm- | |
| BG5 | Um-Gm-Um-G5 | | Am-Am-Am-Cms-Ams-Am | |
| D791- | Ums-Ums-Gm-Um-Gm-Am-Af-Am- | 536 | UmsEVP-Afs-Af-Cf-Am-Cf-Um-Um- | 476 |
| DV26PG5 | Cf-Af-Af-Am-Am-Am-Am-Gm-Uf- | | Um-Um-Um-Um-Gm-Uf-Um-Uf-Cm- | |
| | Gm-Um-Um-Am-G5 | | Am-Cm-Am-Ams-Ams-Cm | |
| D791- | Ums-Ums-Gm-Um-Gm-Am-Af-Am- | 537 | UmsEVP-Afs-Af-Cf-Am-Cf-Td-Um- | 576 |
| DV26Pd7 | Cf-Af-Af-Am-Am-Am-Ad-Gm-Uf- | | Um-Um-Um-Um-Gm-Uf-Um-Uf-Cm- | |
| BG5 | Gm-Um-Um-Am-G5 | | Am-Cm-Am-Ams-Ams-Cm | |
| D791- | Ums-Ums-Gm-Um-Gm-Am-Af-Am- | 538 | UmsEVP-Afs-Af-Cf-Am-Cd-Td-Um- | 577 |
| DV26Pd67 | Cf-Af-Af-Am-Am-Am-Ad-Gd-Uf-Gm- | | Um-Um-Um-Um-Gm-Uf-Um-Uf-Cm- | |
| BG5 | Um-Um-Am-G5 | | Am-Cm-Am-Ams-Ams-Cm | |
| D795- | Gms-Ams-Am-Am-Cm-Am-Af-Am- | 539 | AmsEVP-Afs-Gm-Gf-Gf-Af-Am-Cm- | 479 |
| DV27PG5 | Af-Af-Af-Gm-Um-Gm-Um-Um-Cf- | | Am-Cm-Um-Um-Um-Uf-Um-Uf-Gm- | |
| | Cm-Cm-Um-Um-G5 | | Um-Um-Um-Cms-Ams-Cm | |
| D795- | Gms-Ams-Am-Am-Cm-Am-Af-Am- | 540 | AmsEVP-Afs-Gm-Gf-Gf-Ad-Ad-Cm- | 578 |
| DV27Pd67 | Af-Af-Af-Gm-Um-Gm-Td-Td-Cf-Cm- | | Am-Cm-Um-Um-Um-Uf-Um-Uf-Gm- | |
| BG5 | Cm-Um-Um-G5 | | Um-Um-Um-Cms-Ams-Cm | |
| D812- | Cms-Cms-Um-Um-Um-Um-Cf-Am- | 541 | UmsEVP-Ufs-Um-Gm-Um-Uf-Cm-Um- | 450 |
| DV25PG5 | Af-Gf-Uf-Um-Gm-Am-Gm-Am-Af- | | Cm-Am-Am-Cm-Um-Uf-Gm-Af-Am- | |
| | Cm-Am-Am-Am-G5 | | Am-Am-Gm-Gms-Gms-Am | |
| D812- | Cms-Cms-Um-Um-Um-Um-Cf-Am- | 542 | UmsEVP-Ufs-Um-Gm-Um-Td-Cd-Um- | 579 |
| DV25Pd67 | Af-Gf-Uf-Um-Gm-Am-Gd-Ad-Af-Cm- | | Cm-Am-Am-Cm-Um-Uf-Gm-Af-Am- | |
| BG5 | Am-Am-Am-G5 | | Am-Am-Gm-Gms-Gms-Am | |
| D816- | Ums-Ums-Cm-Am-Am-Gm-Uf-Um- | 543 | AmsEVP-Afs-Um-Um-Um-Uf-Um-Gm- | 443 |
| DV25PG5 | Gf-Af-Gf-Am-Am-Cm-Am-Am-Af- | | Um-Um-Cm-Um-Cm-Af-Am-Cf-Um- | |
| | Am-Am-Um-Um-G5 | | Um-Gm-Am-Ams-Ams-Am | |
| D816- | Ums-Ums-Cm-Am-Am-Gm-Uf-Um- | 544 | AmsEVP-Afs-Um-Um-Um-Td-Td-Gm- | 580 |
| DV25Pd67 | Gf-Af-Gf-Am-Am-Cm-Ad-Ad-Af-Am- | | Um-Um-Cm-Um-Cm-Af-Am-Cf-Um- | |
| BG5 | Am-Um-Um-G5 | | Um-Gm-Am-Ams-Ams-Am | |
| D835- | Ums-Ums-Gm-Gm-Gm-Um-Uf-Um- | 545 | UmsEVP-Afs-Cf-Uf-Um-Uf-Am-Am- | 433 |
| DV26PG5 | Uf-Af-Af-Am-Am-Um-Um-Am-Af- | | Um-Um-Um-Um-Am-Af-Am-Af-Cm- | |
| | Am-Gm-Um-Am-G5 | | Cm-Cm-Am-Ams-Ums-Um | |
| D835- | Ums-Ums-Gm-Gm-Gm-Um-Uf-Um- | 546 | UmsEVP-Afs-Cf-Uf-Um-Uf-Ad-Am- | 565 |
| DV26Pd7 | Uf-Af-Af-Am-Am-Um-Td-Am-Af- | | Um-Um-Um-Um-Am-Af-Am-Af-Cm- | |
| BG5 | Am-Gm-Um-Am-G5 | | Cm-Cm-Am-Ams-Ums-Um | |
| D835- | Ums-Ums-Gm-Gm-Gm-Um-Uf-Um- | 547 | UmsEVP-Afs-Cf-Uf-Um-Td-Ad-Am- | 566 |
| DV26Pd67 | Uf-Af-Af-Am-Am-Um-Td-Ad-Af-Am- | | Um-Um-Um-Um-Am-Af-Am-Af-Cm- | |
| BG5 | Gm-Um-Am-G5 | | Cm-Cm-Am-Ams-Ums-Um | |
| D838- | Gms-Gms-Um-Um-Um-Um-Af-Am- | 548 | UmsEVP-Ufs-Am-Uf-Af-Cf-Um-Um- | 496 |
| DV29PG5 | Af-Am-Uf-Um-Am-Am-Am-Gm-Uf- | | Um-Am-Am-Um-Um-Uf-Um-Af-Am- | |
| | Am-Um-Am-Am-G5 | | Am-Am-Cm-Cms-Cms-Am | |
| D838- | Gms-Gms-Um-Um-Um-Um-Af-Am- | 549 | UmsEVP-Ufs-Am-Uf-Af-Cf-Td-Um- | 581 |
| DV29Pd7 | Af-Am-Uf-Um-Am-Am-Ad-Gm-Uf- | | Um-Am-Am-Um-Um-Uf-Um-Af-Am- | |
| BG5 | Am-Um-Am-Am-G5 | | Am-Am-Cm-Cms-Cms-Am | |
| D838- | Gms-Gms-Um-Um-Um-Um-Af-Am- | 550 | UmsEVP-Ufs-Am-Uf-Af-Cd-Td-Um- | 582 |
| DV29Pd67 | Af-Am-Uf-Um-Am-Am-Ad-Gd-Uf- | | Um-Am-Am-Um-Um-Uf-Um-Af-Am- | |
| BG5 | Am-Um-Am-Am-G5 | | Am-Am-Cm-Cms-Cms-Am | |
| D839- | Gms-Ums-Um-Um-Um-Am-Af-Am- | 552 | UmsEVP-Gfs-Um-Af-Uf-Af-Cd-Um- | 583 |
| DV29Pd7 | Af-Um-Uf-Am-Am-Am-Gd-Um-Af- | | Um-Um-Am-Am-Um-Uf-Um-Uf-Am- | |
| BG5 | Um-Am-Cm-Am-G5 | | Am-Am-Am-Cms-Cms-Cm | |
| D839- | Gms-Ums-Um-Um-Um-Am-Af-Am- | 553 | UmsEVP-Gfs-Um-Af-Uf-Ad-Cd-Um- | 584 |
| DV29Pd67 | Af-Um-Uf-Am-Am-Am-Gd-Td-Af- | | Um-Um-Am-Am-Um-Uf-Um-Uf-Am- | |
| BG5 | Um-Am-Cm-Am-G5 | | Am-Am-Am-Cms-Cms-Cm | |
| D576s- | Cms-Cms-Am-Cm-Cm-Uf-Um-Uf- | 554 | UmsEVP-Ufs-Cm-Af-Uf-Uf-Am-Gm- | 488 |
| DV29PG5 | Um-Cf-Um-Um-Cm-Um-Am-Af-Um- | | Am-Am-Gm-Am-Am-Af-Am-Gf-Gm- | |
| | Gm-Am-Am-G5 | | Um-Gm-Gms-Gms-Am | |
| D576s- | Cms-Cms-Am-Cm-Cm-Uf-Um-Uf- | 555 | UmsEVP-Ufs-Cm-Af-Uf-Uf-Ad-Gm- | 585 |
| DV29Pd7 | Um-Cf-Um-Um-Cm-Td-Am-Af-Um- | | Am-Am-Gm-Am-Am-Af-Am-Gf-Gm- | |
| BG5 | Gm-Am-Am-G5 | | Um-Gm-Gms-Gms-Am | |
| D576s- | Cms-Cms-Am-Cm-Cm-Uf-Um-Uf- | 556 | UmsEVP-Ufs-Cm-Af-Uf-Td-Ad-Gm- | 586 |
| DV29Pd67 | Um-Cf-Um-Um-Cm-Td-Ad-Af-Um- | | Am-Am-Gm-Am-Am-Af-Am-Gf-Gm- | |
| BG5 | Gm-Am-Am-G5 | | Um-Gm-Gms-Gms-Am | |
| D578s- | Ams-Cms-Cm-Um-Um-Uf-Um-Cf- | 557 | UmsEVP-Afs-Cm-Uf-Cf-Af-Um-Um- | 492 |
| DV29PG5 | Um-Uf-Cm-Um-Am-Am-Um-Gf-Am- | | Am-Gm-Am-Am-Gm-Af-Am-Af-Am- | |
| | Gm-Um-Am-G5 | | Gm-Gm-Ums-Gms-Gm | |
| D578s- | Ams-Cms-Cm-Um-Um-Uf-Um-Cf- | 558 | UmsEVP-Afs-Cm-Uf-Cf-Af-Td-Um- | 569 |
| DV29Pd7 | Um-Uf-Cm-Um-Am-Ad-Um-Gf-Am- | | Am-Gm-Am-Am-Gm-Af-Am-Af-Am- | |
| BG5 | Gm-Um-Am-G5 | | Gm-Gm-Ums-Gms-Gm | |
| D578s- | Ams-Cms-Cm-Um-Um-Uf-Um-Cf- | 559 | UmsEVP-Afs-Cm-Uf-Cf-Ad-Td-Um- | 568 |
| DV29Pd67 | Um-Uf-Cm-Um-Am-Ad-Td-Gf-Am- | | Am-Gm-Am-Am-Gm-Af-Am-Af-Am- | |
| BG5 | Gm-Um-Am-G5 | | Gm-Gm-Ums-Gms-Gm | |
| D585s- | Cms-Ums-Um-Cm-Um-Af-Am-Uf-Gf- | 560 | UmsEVP-Afs-Am-Af-Gf-Uf-Cm-Gm- | 483 |
| DV27PG5 | Af-Gm-Um-Cm-Gm-Am-Cf-Um-Um- | | Am-Cm-Um-Cm-Am-Uf-Um-Af-Gm- | |
| | Um-Am-G5 | | Am-Am-Gms-Ams-Am | |
| Zilebesiran | Gms-Ums-Cm-Am-Um-Cm-Cf-Am- | 561 | Ums-Gfs-Um-Am-Cm-Tgna-Cm-Um- | 587 |
| | Cf-Af-Af-Um-Gm-Am-Gm-Am-Gm- | | Cm-Am-Um-Um-Gm-Uf-Gm-Gf-Am- | |
| | Um-Am-Cm-Am-GL | | Um-Gm-Am-Cms-Gms-Am | |
| DNC- | Gms-Ums-Gm-Am-Am-Am-Cf-Am- | 562 | UmsEVP-Afs-Gm-Af-Gf-Gf-Um-Gm- | 588 |
| DV29PG5 | Af-Cm-Uf-Am-Gm-Um-Gm-Cm-Af- | | Cm-Am-Cm-Um-Am-Gf-Um-Uf-Gm- | |
| | Cm-Cm-Um-Cm-G5 | | Um-Um-Um-Cms-Ams-Cm | |
| APC-ZL | Gms-Ums-Cm-Am-Um-Cm-Cf-Am- | 563 | Ums-Gfs-Um-Am-Cm-Tgna-Cm-Um- | 587 |
| | Cf-Af-Af-Um-Gm-Am-Gm-Am-Gm- | | Cm-Am-Um-Um-Gm-Uf-Gm-Gf-Am- | |
| | Um-Am-Cm-Am | | Um-Gm-Am-Cms-Gms-Am | |

The application's sequence listing, which the Patent Office published only in electronic form, follows.

SEQUENCE LISTING (588 sequences)

SEQ ID NO: 1 - RNA, 21 nt, synthetic construct
  source 1..21: mol_type = other RNA
ttgggttttaaaattaaagta

SEQ ID NO: 2 - RNA, 21 nt, synthetic construct
  source 1..21: mol_type = other RNA
ttcaagttgagaacaaaaatt

SEQ ID NO: 3 - RNA, 21 nt, synthetic construct
  source 1..21: mol_type = other RNA
ccttttcaagttgagaacaaa

SEQ ID NO: 4 - RNA, 21 nt, synthetic construct
  source 1..21: mol_type = other RNA
ccttttcttctaatgagtcga

SEQ ID NO: 5 - RNA, 21 nt, synthetic construct
  source 1..21: mol_type = other RNA
tgggttttaaaattaaagtat

SEQ ID NO: 6 - RNA, 21 nt, synthetic construct
  source 1..21: mol_type = other RNA
gtttgtgaaacaaaaaagtgt

SEQ ID NO: 7 - RNA, 21 nt, synthetic construct
  source 1..21: mol_type = other RNA
gttttaaaattaaagtataca

SEQ ID NO: 8 - RNA, 21 nt, synthetic construct
  source 1..21: mol_type = other RNA
ttgtgaaacaaaaaagtgtta

SEQ ID NO: 9 - RNA, 21 nt, synthetic construct
  source 1..21: mol_type = other RNA
gaaacaaaaaagtgttccctt

SEQ ID NO: 10 - RNA, 20 nt, synthetic construct
  source 1..20: mol_type = other RNA
cttctaatgagtcgacttta

SEQ ID NO: 11 - RNA, 20 nt, synthetic construct
  source 1..20: mol_type = other RNA
ccaccttttcttctaatgaa

SEQ ID NO: 12 - RNA, 20 nt, synthetic construct
  source 1..20: mol_type = other RNA
accttttcttctaatgagta

SEQ ID NO: 13 - RNA, 21 nt, synthetic construct
  source 1..21: mol_type = other RNA
ggttttaaaattaaagtataa

SEQ ID NO: 14 - RNA, 23 nt, synthetic construct
  source 1..23: mol_type = other RNA
tactttaattttaaaacccaatt

SEQ ID NO: 15 - RNA, 23 nt, synthetic construct
  source 1..23: mol_type = other RNA
aatttttgttctcaacttgaaaa

SEQ ID NO: 16 - RNA, 23 nt, synthetic construct
  source 1..23: mol_type = other RNA
tttgttctcaacttgaaaaggga

SEQ ID NO: 17 - RNA, 23 nt, synthetic construct
  source 1..23: mol_type = other RNA
tcgactcattagaagaaaaggtg

SEQ ID NO: 18 - RNA, 23 nt, synthetic construct
  source 1..23: mol_type = other RNA
atactttaattttaaaacccaat

SEQ ID NO: 19 - RNA, 23 nt, synthetic construct
  source 1..23: mol_type = other RNA
acacttttttgtttcacaaacaa

SEQ ID NO: 20 - RNA, 23 nt, synthetic construct
  source 1..23: mol_type = other RNA
tgtatactttaattttaaaaccc

SEQ ID NO: 21 - RNA, 23 nt, synthetic construct
  source 1..23: mol_type = other RNA
taacacttttttgtttcacaaac

SEQ ID NO: 22 - RNA, 23 nt, synthetic construct
  source 1..23: mol_type = other RNA
aagggaacacttttttgtttcac

SEQ ID NO: 23 - RNA, 22 nt, synthetic construct
  source 1..22: mol_type = other RNA
taaagtcgactcattagaagaa

SEQ ID NO: 24 - RNA, 22 nt, synthetic construct
  source 1..22: mol_type = other RNA
ttcattagaagaaaaggtggga

SEQ ID NO: 25 - RNA, 22 nt, synthetic construct
  source 1..22: mol_type = other RNA
tactcattagaagaaaaggtgg

SEQ ID NO: 26 - RNA, 23 nt, synthetic construct
  source 1..23: mol_type = other RNA
ttatactttaattttaaaaccca

SEQ ID NO: 27 - RNA, 21 nt, synthetic construct
  source 1..21: mol_type = other RNA
cttcactgagagcgcctgcct

SEQ ID NO: 28 - RNA, 21 nt, synthetic construct
  source 1..21: mol_type = other RNA
cactgagagcgcctgcctgct

SEQ ID NO: 29 - RNA, 21 nt, synthetic construct
  source 1..21: mol_type = other RNA
tgagagcgcctgcctgctgct

SEQ ID NO: 30 - RNA, 21 nt, synthetic construct
  source 1..21: mol_type = other RNA
agagcgcctgcctgctgctga

SEQ ID NO: 31 - RNA, 21 nt, synthetic construct
  source 1..21: mol_type = other RNA
gagcgcctgcctgctgctgat

SEQ ID NO: 32 - RNA, 21 nt, synthetic construct
  source 1..21: mol_type = other RNA
cgcctgcctgctgctgatcca

SEQ ID NO: 33 - RNA, 21 nt, synthetic construct
  source 1..21: mol_type = other RNA
tgcctgctgctgatccagcct

SEQ ID NO: 34 - RNA, 21 nt, synthetic construct
  source 1..21: mol_type = other RNA
cctgctgctgatccagcctca

SEQ ID NO: 35 - RNA, 21 nt, synthetic construct
  source 1..21: mol_type = other RNA
tgctgctgatccagcctcact

SEQ ID NO: 36 - RNA, 21 nt, synthetic construct
  source 1..21: mol_type = other RNA
gctgctgatccagcctcacta

SEQ ID NO: 37 - RNA, 21 nt, synthetic construct
  source 1..21: mol_type = other RNA
ctgctgatccagcctcactat

SEQ ID NO: 38 - RNA, 21 nt, synthetic construct
  source 1..21: mol_type = other RNA
ccagcctcactatgcctctga

SEQ ID NO: 39 - RNA, 21 nt, synthetic construct
  source 1..21: mol_type = other RNA
gcctcactatgcctctgacct

SEQ ID NO: 40 - RNA, 21 nt, synthetic construct
  source 1..21: mol_type = other RNA
tcactatgcctctgacctgga

SEQ ID NO: 41 - RNA, 21 nt, synthetic construct
  source 1..21: mol_type = other RNA
actatgcctctgacctggaca

SEQ ID NO: 42 - RNA, 21 nt, synthetic construct
  source 1..21: mol_type = other RNA
ctatgcctctgacctggacaa

SEQ ID NO: 43 - RNA, 21 nt, synthetic construct
  source 1..21: mol_type = other RNA
ctctgacctggacaaggtgga

SEQ ID NO: 44 - RNA, 21 nt, synthetic construct
  source 1..21: mol_type = other RNA
gacctggacaaggtggagggt

SEQ ID NO: 45 - RNA, 21 nt, synthetic construct
  source 1..21: mol_type = other RNA
tggacaaggtggagggtctca

SEQ ID NO: 46 - RNA, 20 nt, synthetic construct
  source 1..20: mol_type = other RNA
caaggtggagggtctcactt

SEQ ID NO: 47 - RNA, 21 nt, synthetic construct
  source 1..21: mol_type = other RNA
ggagggtctcactttccagca

SEQ ID NO: 48 - RNA, 21 nt, synthetic construct
  source 1..21: mol_type = other RNA
cagggtgggggaggtgctgaa

SEQ ID NO: 49 - RNA, 21 nt, synthetic construct
  source 1..21: mol_type = other RNA
gggtgggggaggtgctgaaca

SEQ ID NO: 50 - RNA, 21 nt, synthetic construct
  source 1..21: mol_type = other RNA
tgggggaggtgctgaacagca

SEQ ID NO: 51 - RNA, 21 nt, synthetic construct
  source 1..21: mol_type = other RNA
gggggaggtgctgaacagcat

SEQ ID NO: 52 - RNA, 21 nt, synthetic construct
  source 1..21: mol_type = other RNA
ggggaggtgctgaacagcatt

SEQ ID NO: 53 - RNA, 21 nt, synthetic construct
  source 1..21: mol_type = other RNA
gggaggtgctgaacagcattt

SEQ ID NO: 54 - RNA, 21 nt, synthetic construct
  source 1..21: mol_type = other RNA
aacagcattttttttgagctt

SEQ ID NO: 55 - RNA, 21 nt, synthetic construct
  source 1..21: mol_type = other RNA
cagcattttttttgagcttga

SEQ ID NO: 56 - RNA, 21 nt, synthetic construct
  source 1..21: mol_type = other RNA
agcattttttttgagcttgaa

SEQ ID NO: 57 - RNA, 21 nt, synthetic construct
  source 1..21: mol_type = other RNA
ggtgaccctgaaccgcccatt

SEQ ID NO: 58 - RNA, 21 nt, synthetic construct
  source 1..21: mol_type = other RNA
gaccctgaaccgcccattcct

SEQ ID NO: 59 - RNA, 21 nt, synthetic construct
  source 1..21: mol_type = other RNA
ccctgaaccgcccattcctgt

SEQ ID NO: 60 - RNA, 21 nt, synthetic construct
  source 1..21: mol_type = other RNA
ctgaaccgcccattcctgttt

SEQ ID NO: 61 - RNA, 21 nt, synthetic construct
  source 1..21: mol_type = other RNA
gtgtatgatcaaagcgccact

SEQ ID NO: 62 - RNA, 21 nt, synthetic construct
  source 1..21: mol_type = other RNA
tcaaagcgccactgccctgca

SEQ ID NO: 63 - RNA, 21 nt, synthetic construct
  source 1..21: mol_type = other RNA
aagcgccactgccctgcactt

SEQ ID NO: 64 - RNA, 21 nt, synthetic construct
  source 1..21: mol_type = other RNA
cgccactgccctgcacttcct

SEQ ID NO: 65 - RNA, 21 nt, synthetic construct
  source 1..21: mol_type = other RNA
gcgatgtgtcacccccagtct

SEQ ID NO: 66 - RNA, 21 nt, synthetic construct
  source 1..21: mol_type = other RNA
tgtgtcacccccagtctccca

SEQ ID NO: 67 - RNA, 21 nt, synthetic construct
  source 1..21: mol_type = other RNA
gtcacccccagtctcccacct

SEQ ID NO: 68 - RNA, 21 nt, synthetic construct
  source 1..21: mol_type = other RNA
tcacccccagtctcccacctt

SEQ ID NO: 69 - RNA, 21 nt, synthetic construct
  source 1..21: mol_type = other RNA
acccccagtctcccacctttt

SEQ ID NO: 70 - RNA, 21 nt, synthetic construct
  source 1..21: mol_type = other RNA
atgagtcgactttgagctgga

SEQ ID NO: 71 - RNA, 21 nt, synthetic construct
  source 1..21: mol_type = other RNA
tgagtcgactttgagctggaa

SEQ ID NO: 72 - RNA, 21 nt, synthetic construct
  source 1..21: mol_type = other RNA
gagtcgactttgagctggaaa

SEQ ID NO: 73 - RNA, 21 nt, synthetic construct
  source 1..21: mol_type = other RNA
tcgactttgagctggaaagca

SEQ ID NO: 74 - RNA, 21 nt, synthetic construct
  source 1..21: mol_type = other RNA
ttgagctggaaagcagccgtt

SEQ ID NO: 75 - RNA, 21 nt, synthetic construct
  source 1..21: mol_type = other RNA
tgagctggaaagcagccgttt

SEQ ID NO: 76 - RNA, 21 nt, synthetic construct
  source 1..21: mol_type = other RNA
tggaaagcagccgtttctcct

SEQ ID NO: 77 - RNA, 21 nt, synthetic construct
  source 1..21: mol_type = other RNA
aagcagccgtttctccttggt

SEQ ID NO: 78 - RNA, 21 nt, synthetic construct
  source 1..21: mol_type = other RNA
caaccgaccagcttgtttgta

SEQ ID NO: 79 - RNA, 21 nt, synthetic construct
  source 1..21: mol_type = other RNA
tttgtgaaacaaaaaagtgtt

SEQ ID NO: 80 - RNA, 21 nt, synthetic construct
  source 1..21: mol_type = other RNA
aaacaaaaaagtgttcccttt

SEQ ID NO: 81 - RNA, 20 nt, synthetic construct
  source 1..20: mol_type = other RNA
acaaaaaagtgttccctttt

SEQ ID NO: 82 - RNA, 21 nt, synthetic construct
  source 1..21: mol_type = other RNA
caaaaaagtgttcccttttca

SEQ ID NO: 83 - RNA, 21 nt, synthetic construct
  source 1..21: mol_type = other RNA
tcccttttcaagttgagaaca

SEQ ID NO: 84 - RNA, 21 nt, synthetic construct
  source 1..21: mol_type = other RNA
cccttttcaagttgagaacaa

SEQ ID NO: 85 - RNA, 21 nt, synthetic construct
  source 1..21: mol_type = other RNA
ttttcaagttgagaacaaaaa

SEQ ID NO: 86 - RNA, 21 nt, synthetic construct
  source 1..21: mol_type = other RNA
tttcaagttgagaacaaaaat

SEQ ID NO: 87 - RNA, 21 nt, synthetic construct
  source 1..21: mol_type = other RNA
tcaagttgagaacaaaaattg

SEQ ID NO: 88 - RNA, 21 nt, synthetic construct
  source 1..21: mol_type = other RNA
acaaaaattgggttttaaaat

SEQ ID NO: 89 - RNA, 20 nt, synthetic construct
  source 1..20: mol_type = other RNA
ggttttaaaattaaagtata

SEQ ID NO: 90 - RNA, 21 nt, synthetic construct
  source 1..21: mol_type = other RNA
atagctggttatttctccctt

SEQ ID NO: 91 - RNA, 21 nt, synthetic construct
  source 1..21: mol_type = other RNA
agctggttatttctcccttgt

SEQ ID NO: 92 - RNA, 21 nt, synthetic construct
  source 1..21: mol_type = other RNA
gttatttctcccttgtgttaa

SEQ ID NO: 93 - RNA, 21 nt, synthetic construct
  source 1..21: mol_type = other RNA
ttctcccttgtgttagtaata

SEQ ID NO: 94 - RNA, 21 nt, synthetic construct
  source 1..21: mol_type = other RNA
tctcccttgtgttagtaataa

SEQ ID NO: 95 - RNA, 21 nt, synthetic construct
  source 1..21: mol_type = other RNA
ctcccttgtgttagtaataaa

SEQ ID NO: 96 - RNA, 21 nt, synthetic construct
  source 1..21: mol_type = other RNA
tcccttgtgttagtaataaaa

SEQ ID NO: 97 - RNA, 21 nt, synthetic construct
  source 1..21: mol_type = other RNA
agaactggatgttgctgctga

SEQ ID NO: 98 - RNA, 21 nt, synthetic construct
  source 1..21: mol_type = other RNA
aactggatgttgctgctgaga

SEQ ID NO: 99 - RNA, 21 nt, synthetic construct
  source 1..21: mol_type = other RNA
actggatgttgctgctgagaa

SEQ ID NO: 100 - RNA, 21 nt, synthetic construct
  source 1..21: mol_type = other RNA
tggatgttgctgctgagaaga

SEQ ID NO: 101 - RNA, 20 nt, synthetic construct
  source 1..20: mol_type = other RNA
tggatgttgctgctgagaaa

SEQ ID NO: 102 - RNA, 21 nt, synthetic construct
  source 1..21: mol_type = other RNA
gatgttgctgctgagaagatt

SEQ ID NO: 103 - RNA, 21 nt, synthetic construct
  source 1..21: mol_type = other RNA
ctgctgagaagattgacaggt

SEQ ID NO: 104 - RNA, 20 nt, synthetic construct
  source 1..20: mol_type = other RNA
gattgacaggttcatgcaga

SEQ ID NO: 105 - RNA, 21 nt, synthetic construct
  source 1..21: mol_type = other RNA
gcactggagtgacatccagga

SEQ ID NO: 106 - RNA, 21 nt, synthetic construct
  source 1..21: mol_type = other RNA
ctggagtgacatccaggacaa

SEQ ID NO: 107 - RNA, 21 nt, synthetic construct
  source 1..21: mol_type = other RNA
gagtgacatccaggacaactt

SEQ ID NO: 108 - RNA, 21 nt, synthetic construct
  source 1..21: mol_type = other RNA
gtgacatccaggacaacttct

SEQ ID NO: 109 - RNA, 21 nt, synthetic construct
  source 1..21: mol_type = other RNA
gacaacttctcggtgactcaa

SEQ ID NO: 110 - RNA, 21 nt, synthetic construct
  source 1..21: mol_type = other RNA
caacttctcggtgactcaagt

SEQ ID NO: 111 - RNA, 21 nt, synthetic construct
  source 1..21: mol_type = other RNA
cggtgactcaagtgcccttca

SEQ ID NO: 112 - RNA, 21 nt, synthetic construct
  source 1..21: mol_type = other RNA
gtgactcaagtgcccttcact

SEQ ID NO: 113 - RNA, 23 nt, synthetic construct
  source 1..23: mol_type = other RNA
aggcaggcgctctcagtgaaggg

SEQ ID NO: 114 - RNA, 23 nt, synthetic construct
  source 1..23: mol_type = other RNA
agcaggcaggcgctctcagtgaa

SEQ ID NO: 115 - RNA, 23 nt, synthetic construct
  source 1..23: mol_type = other RNA
agcagcaggcaggcgctctcagt

SEQ ID NO: 116 - RNA, 23 nt, synthetic construct
  source 1..23: mol_type = other RNA
tcagcagcaggcaggcgctctca

SEQ ID NO: 117 - RNA, 23 nt, synthetic construct
  source 1..23: mol_type = other RNA
atcagcagcaggcaggcgctctc

SEQ ID NO: 118 - RNA, 23 nt, synthetic construct
  source 1..23: mol_type = other RNA
tggatcagcagcaggcaggcgct

SEQ ID NO: 119 - RNA, 23 nt, synthetic construct
  source 1..23: mol_type = other RNA
aggctggatcagcagcaggcagg

SEQ ID NO: 120 - RNA, 23 nt, synthetic construct
  source 1..23: mol_type = other RNA
tgaggctggatcagcagcaggca

SEQ ID NO: 121 - RNA, 23 nt, synthetic construct
  source 1..23: mol_type = other RNA
agtgaggctggatcagcagcagg

SEQ ID NO: 122 - RNA, 23 nt, synthetic construct
  source 1..23: mol_type = other RNA
tagtgaggctggatcagcagcag

SEQ ID NO: 123 - RNA, 23 nt, synthetic construct
  source 1..23: mol_type = other RNA
atagtgaggctggatcagcagca

SEQ ID NO: 124 - RNA, 23 nt, synthetic construct
  source 1..23: mol_type = other RNA
tcagaggcatagtgaggctggat

SEQ ID NO: 125 - RNA, 23 nt, synthetic construct
  source 1..23: mol_type = other RNA
aggtcagaggcatagtgaggctg

SEQ ID NO: 126 - RNA, 23 nt, synthetic construct
  source 1..23: mol_type = other RNA
tccaggtcagaggcatagtgagg

SEQ ID NO: 127 - RNA, 23 nt, synthetic construct
  source 1..23: mol_type = other RNA
tgtccaggtcagaggcatagtga

SEQ ID NO: 128 - RNA, 23 nt, synthetic construct
  source 1..23: mol_type = other RNA
ttgtccaggtcagaggcatagtg

SEQ ID NO: 129 - RNA, 23 nt, synthetic construct
  source 1..23: mol_type = other RNA
tccaccttgtccaggtcagaggc

SEQ ID NO: 130 - RNA, 23 nt, synthetic construct
  source 1..23: mol_type = other RNA
accctccaccttgtccaggtcag

SEQ ID NO: 131 - RNA, 23 nt, synthetic construct
  source 1..23: mol_type = other RNA
tgagaccctccaccttgtccagg

SEQ ID NO: 132 - RNA, 22 nt, synthetic construct
  source 1..22: mol_type = other RNA
aagtgagaccctccaccttgtc

SEQ ID NO: 133 - RNA, 23 nt, synthetic construct
  source 1..23: mol_type = other RNA
tgctggaaagtgagaccctccac

SEQ ID NO: 134 - RNA, 23 nt, synthetic construct
  source 1..23: mol_type = other RNA
ttcagcacctcccccaccctgat

SEQ ID NO: 135 - RNA, 23 nt, synthetic construct
  source 1..23: mol_type = other RNA
tgttcagcacctcccccaccctg

SEQ ID NO: 136 - RNA, 23 nt, synthetic construct
  source 1..23: mol_type = other RNA
tgctgttcagcacctcccccacc

SEQ ID NO: 137 - RNA, 23 nt, synthetic construct
  source 1..23: mol_type = other RNA
atgctgttcagcacctcccccac

SEQ ID NO: 138 - RNA, 23 nt, synthetic construct
  source 1..23: mol_type = other RNA
aatgctgttcagcacctccccca

SEQ ID NO: 139 - RNA, 23 nt, synthetic construct
  source 1..23: mol_type = other RNA
aaatgctgttcagcacctccccc

SEQ ID NO: 140 - RNA, 23 nt, synthetic construct
  source 1..23: mol_type = other RNA
aagctcaaaaaaaatgctgttca

SEQ ID NO: 141 - RNA, 23 nt, synthetic construct
  source 1..23: mol_type = other RNA
tcaagctcaaaaaaaatgctgtt

SEQ ID NO: 142 - RNA, 23 nt, synthetic construct
  source 1..23: mol_type = other RNA
ttcaagctcaaaaaaaatgctgt

SEQ ID NO: 143 - RNA, 23 nt, synthetic construct
  source 1..23: mol_type = other RNA
aatgggcggttcagggtcacctc

SEQ ID NO: 144 - RNA, 23 nt, synthetic construct
  source 1..23: mol_type = other RNA
aggaatgggcggttcagggtcac

SEQ ID NO: 145 - RNA, 23 nt, synthetic construct
  source 1..23: mol_type = other RNA
acaggaatgggcggttcagggtc

SEQ ID NO: 146 - RNA, 23 nt, synthetic construct
  source 1..23: mol_type = other RNA
aaacaggaatgggcggttcaggg

SEQ ID NO: 147 - RNA, 23 nt, synthetic construct
  source 1..23: mol_type = other RNA
agtggcgctttgatcatacacag

SEQ ID NO: 148 - RNA, 23 nt, synthetic construct
  source 1..23: mol_type = other RNA
tgcagggcagtggcgctttgatc

SEQ ID NO: 149 - RNA, 23 nt, synthetic construct
  source 1..23: mol_type = other RNA
aagtgcagggcagtggcgctttg

SEQ ID NO: 150 - RNA, 23 nt, synthetic construct
  source 1..23: mol_type = other RNA
aggaagtgcagggcagtggcgct

SEQ ID NO: 151 - RNA, 23 nt, synthetic construct
  source 1..23: mol_type = other RNA
agactgggggtgacacatcgctg

SEQ ID NO: 152 - RNA, 23 nt, synthetic construct
  source 1..23: mol_type = other RNA
tgggagactgggggtgacacatc

SEQ ID NO: 153 - RNA, 23 nt, synthetic construct
  source 1..23: mol_type = other RNA
aggtgggagactgggggtgacac

SEQ ID NO: 154 - RNA, 23 nt, synthetic construct
  source 1..23: mol_type = other RNA
aaggtgggagactgggggtgaca

SEQ ID NO: 155 - RNA, 23 nt, synthetic construct
  source 1..23: mol_type = other RNA
aaaaggtgggagactgggggtga

SEQ ID NO: 156 - RNA, 23 nt, synthetic construct
  source 1..23: mol_type = other RNA
tccagctcaaagtcgactcatta

SEQ ID NO: 157 - RNA, 23 nt, synthetic construct
  source 1..23: mol_type = other RNA
ttccagctcaaagtcgactcatt

SEQ ID NO: 158 - RNA, 23 nt, synthetic construct
  source 1..23: mol_type = other RNA
tttccagctcaaagtcgactcat

SEQ ID NO: 159 - RNA, 23 nt, synthetic construct
  source 1..23: mol_type = other RNA
tgctttccagctcaaagtcgact

SEQ ID NO: 160 - RNA, 23 nt, synthetic construct
  source 1..23: mol_type = other RNA
aacggctgctttccagctcaaag

SEQ ID NO: 161 - RNA, 23 nt, synthetic construct
  source 1..23: mol_type = other RNA
aaacggctgctttccagctcaaa

SEQ ID NO: 162 - RNA, 23 nt, synthetic construct
  source 1..23: mol_type = other RNA
aggagaaacggctgctttccagc

SEQ ID NO: 163 - RNA, 23 nt, synthetic construct
  source 1..23: mol_type = other RNA
accaaggagaaacggctgctttc

SEQ ID NO: 164 - RNA, 23 nt, synthetic construct
  source 1..23: mol_type = other RNA
tacaaacaagctggtcggttgga

SEQ ID NO: 165 - RNA, 23 nt, synthetic construct
  source 1..23: mol_type = other RNA
aacacttttttgtttcacaaaca

SEQ ID NO: 166 - RNA, 23 nt, synthetic construct
  source 1..23: mol_type = other RNA
aaagggaacacttttttgtttca

SEQ ID NO: 167 - RNA, 22 nt, synthetic construct
  source 1..22: mol_type = other RNA
aaaagggaacacttttttgttt

SEQ ID NO: 168 - RNA, 23 nt, synthetic construct
  source 1..23: mol_type = other RNA
tgaaaagggaacacttttttgtt

SEQ ID NO: 169 - RNA, 23 nt, synthetic construct
  source 1..23: mol_type = other RNA
tgttctcaacttgaaaagggaac

SEQ ID NO: 170 - RNA, 23 nt, synthetic construct
  source 1..23: mol_type = other RNA
ttgttctcaacttgaaaagggaa

SEQ ID NO: 171 - RNA, 23 nt, synthetic construct
  source 1..23: mol_type = other RNA
tttttgttctcaacttgaaaagg

SEQ ID NO: 172 - RNA, 23 nt, synthetic construct
  source 1..23: mol_type = other RNA
atttttgttctcaacttgaaaag

SEQ ID NO: 173 - RNA, 23 nt, synthetic construct
  source 1..23: mol_type = other RNA
caatttttgttctcaacttgaaa

SEQ ID NO: 174 - RNA, 23 nt, synthetic construct
  source 1..23: mol_type = other RNA
attttaaaacccaatttttgttc

SEQ ID NO: 175 - RNA, 22 nt, synthetic construct
  source 1..22: mol_type = other RNA
tatactttaattttaaaaccca

SEQ ID NO: 176 - RNA, 23 nt, synthetic construct
  source 1..23: mol_type = other RNA
aagggagaaataaccagctatgg

SEQ ID NO: 177 - RNA, 23 nt, synthetic construct
  source 1..23: mol_type = other RNA
acaagggagaaataaccagctat

SEQ ID NO: 178 - RNA, 23 nt, synthetic construct
  source 1..23: mol_type = other RNA
ttaacacaagggagaaataacca

SEQ ID NO: 179 - RNA, 23 nt, synthetic construct
  source 1..23: mol_type = other RNA
tattactaacacaagggagaaat

SEQ ID NO: 180 - RNA, 23 nt, synthetic construct
  source 1..23: mol_type = other RNA
ttattactaacacaagggagaaa

SEQ ID NO: 181 - RNA, 23 nt, synthetic construct
  source 1..23: mol_type = other RNA
tttattactaacacaagggagaa

SEQ ID NO: 182 - RNA, 23 nt, synthetic construct
  source 1..23: mol_type = other RNA
ttttattactaacacaagggaga

SEQ ID NO: 183 - RNA, 23 nt, synthetic construct
  source 1..23: mol_type = other RNA
tcagcagcaacatccagttctgt

SEQ ID NO: 184 - RNA, 23 nt, synthetic construct
  source 1..23: mol_type = other RNA
tctcagcagcaacatccagttct

SEQ ID NO: 185 - RNA, 23 nt, synthetic construct
  source 1..23: mol_type = other RNA
ttctcagcagcaacatccagttc

SEQ ID NO: 186 - RNA, 23 nt, synthetic construct
  source 1..23: mol_type = other RNA
tcttctcagcagcaacatccagt

SEQ ID NO: 187 - RNA, 22 nt, synthetic construct
  source 1..22: mol_type = other RNA
tttctcagcagcaacatccagt

SEQ ID NO: 188 - RNA, 23 nt, synthetic construct
  source 1..23: mol_type = other RNA
aatcttctcagcagcaacatcca

SEQ ID NO: 189 - RNA, 23 nt, synthetic construct
  source 1..23: mol_type = other RNA
acctgtcaatcttctcagcagca

SEQ ID NO: 190 - RNA, 22 nt, synthetic construct
  source 1..22: mol_type = other RNA
tctgcatgaacctgtcaatctt

SEQ ID NO: 191 - RNA, 23 nt, synthetic construct
  source 1..23: mol_type = other RNA
tcctggatgtcactccagtgctg

SEQ ID NO: 192 - RNA, 23 nt, synthetic construct
  source 1..23: mol_type = other RNA
ttgtcctggatgtcactccagtg

SEQ ID NO: 193 - RNA, 23 nt, synthetic construct
  source 1..23: mol_type = other RNA
aagttgtcctggatgtcactcca

SEQ ID NO: 194 - RNA, 23 nt, synthetic construct
  source 1..23: mol_type = other RNA
agaagttgtcctggatgtcactc

SEQ ID NO: 195 - RNA, 23 nt, synthetic construct
  source 1..23: mol_type = other RNA
ttgagtcaccgagaagttgtcct

SEQ ID NO: 196 - RNA, 23 nt, synthetic construct
  source 1..23: mol_type = other RNA
acttgagtcaccgagaagttgtc

SEQ ID NO: 197 - RNA, 23 nt, synthetic construct
  source 1..23: mol_type = other RNA
tgaagggcacttgagtcaccgag

SEQ ID NO: 198 - RNA, 23 nt, synthetic construct
  source 1..23: mol_type = other RNA
agtgaagggcacttgagtcaccg

SEQ ID NO: 199 - RNA, 21 nt, synthetic construct
  source 1..21: mol_type = other RNA
  modified_base 1: mod_base = OTHER; note = 2'- fluoro, 3'- thiophosphate
  modified_base 2: mod_base = OTHER; note = 2'-O- methyl, 3'- thiophosphate
  modified_base 3: mod_base = OTHER; note = 2'- fluoro
  modified_base 4: mod_base = OTHER; note = 2'-O- methyl
  modified_base 5: mod_base = OTHER; note = 2'- fluoro
  modified_base 6: mod_base = OTHER; note = 2'-O- methyl
  modified_base 7: mod_base = OTHER; note = 2'- fluoro
  modified_base 8: mod_base = OTHER; note = 2'-O- methyl
  modified_base 9: mod_base = OTHER; note = 2'- fluoro
  modified_base 10: mod_base = OTHER; note = 2'-O- methyl
  modified_base 11: mod_base = OTHER; note = 2'- fluoro
  modified_base 12: mod_base = OTHER; note = 2'-O- methyl
  modified_base 13: mod_base = OTHER; note = 2'- fluoro
  modified_base 14: mod_base = OTHER; note = 2'-O- methyl
  modified_base 15: mod_base = OTHER; note = 2'- fluoro
  modified_base 16: mod_base = OTHER; note = 2'-O- methyl
  modified_base 17: mod_base = OTHER; note = 2'- fluoro
  modified_base 18: mod_base = OTHER; note = 2'-O- methyl
  modified_base 19: mod_base = OTHER; note = 2'- fluoro
  modified_base 20: mod_base = OTHER; note = 2'-O- methyl
  modified_base 21: mod_base = OTHER; note = 2'- fluoro
ttgggttttaaaattaaagta

SEQ ID NO: 200 - RNA, 21 nt, synthetic construct
  source 1..21: mol_type = other RNA
  modified_base 1: mod_base = OTHER; note = 2'- fluoro, 3'- thiophosphate
  modified_base 2: mod_base = OTHER; note = 2'-O- methyl, 3'- thiophosphate
  modified_base 3: mod_base = OTHER; note = 2'- fluoro
  modified_base 4: mod_base = OTHER; note = 2'-O- methyl
  modified_base 5: mod_base = OTHER; note = 2'- fluoro
  modified_base 6: mod_base = OTHER; note = 2'-O- methyl
  modified_base 7: mod_base = OTHER; note = 2'- fluoro
  modified_base 8: mod_base = OTHER; note = 2'-O- methyl
  modified_base 9: mod_base = OTHER; note = 2'- fluoro
  modified_base 10: mod_base = OTHER; note = 2'-O- methyl
  modified_base 11: mod_base = OTHER; note = 2'- fluoro
  modified_base 12: mod_base = OTHER; note = 2'-O- methyl
  modified_base 13: mod_base = OTHER; note = 2'- fluoro
  modified_base 14: mod_base = OTHER; note = 2'-O- methyl
  modified_base 15: mod_base = OTHER; note = 2'- fluoro
  modified_base 16: mod_base = OTHER; note = 2'-O- methyl
  modified_base 17: mod_base = OTHER; note = 2'- fluoro
  modified_base 18: mod_base = OTHER; note = 2'-O- methyl
  modified_base 19: mod_base = OTHER; note = 2'- fluoro
  modified_base 20: mod_base = OTHER; note = 2'-O- methyl
  modified_base 21: mod_base = OTHER; note = 2'- fluoro
ttcaagttgagaacaaaaatt

SEQ ID NO: 201 - RNA, 21 nt, synthetic construct
  source 1..21: mol_type = other RNA
  modified_base 1: mod_base = OTHER; note = 2'- fluoro, 3'- thiophosphate
  modified_base 2: mod_base = OTHER; note = 2'-O- methyl, 3'- thiophosphate
  modified_base 3: mod_base = OTHER; note = 2'- fluoro
  modified_base 4: mod_base = OTHER; note = 2'-O- methyl
  modified_base 5: mod_base = OTHER; note = 2'- fluoro
  modified_base 6: mod_base = OTHER; note = 2'-O- methyl
  modified_base 7: mod_base = OTHER; note = 2'- fluoro
  modified_base 8: mod_base = OTHER; note = 2'-O- methyl
  modified_base 9: mod_base = OTHER; note = 2'- fluoro
  modified_base 10: mod_base = OTHER; note = 2'-O- methyl
  modified_base 11: mod_base = OTHER; note = 2'- fluoro
  modified_base 12: mod_base = OTHER; note = 2'-O- methyl
  modified_base 13: mod_base = OTHER; note = 2'- fluoro
  modified_base 14: mod_base = OTHER; note = 2'-O- methyl
  modified_base 15: mod_base = OTHER; note = 2'- fluoro
  modified_base 16: mod_base = OTHER; note = 2'-O- methyl
  modified_base 17: mod_base = OTHER; note = 2'- fluoro
  modified_base 18: mod_base = OTHER; note = 2'-O- methyl
  modified_base 19: mod_base = OTHER; note = 2'- fluoro
  modified_base 20: mod_base = OTHER; note = 2'-O- methyl
  modified_base 21: mod_base = OTHER; note = 2'- fluoro
ccttttcaagttgagaacaaa

SEQ ID NO: 202 - RNA, 21 nt, synthetic construct
  source 1..21: mol_type = other RNA
  modified_base 1: mod_base = OTHER; note = 2'- fluoro, 3'- thiophosphate
  modified_base 2: mod_base = OTHER; note = 2'-O- methyl, 3'- thiophosphate
  modified_base 3: mod_base = OTHER; note = 2'- fluoro
  modified_base 4: mod_base = OTHER; note = 2'-O- methyl
  modified_base 5: mod_base = OTHER; note = 2'- fluoro
  modified_base 6: mod_base = OTHER; note = 2'-O- methyl
  modified_base 7: mod_base = OTHER; note = 2'- fluoro
  modified_base 8: mod_base = OTHER; note = 2'-O- methyl
  modified_base 9: mod_base = OTHER; note = 2'- fluoro
  modified_base 10: mod_base = OTHER; note = 2'-O- methyl
  modified_base 11: mod_base = OTHER; note = 2'- fluoro
  modified_base 12: mod_base = OTHER; note = 2'-O- methyl
  modified_base 13: mod_base = OTHER; note = 2'- fluoro
  modified_base 14: mod_base = OTHER; note = 2'-O- methyl
  modified_base 15: mod_base = OTHER; note = 2'- fluoro
  modified_base 16: mod_base = OTHER; note = 2'-O- methyl
  modified_base 17: mod_base = OTHER; note = 2'- fluoro
  modified_base 18: mod_base = OTHER; note = 2'-O- methyl
  modified_base 19: mod_base = OTHER; note = 2'- fluoro
  modified_base 20: mod_base = OTHER; note = 2'-O- methyl
  modified_base 21: mod_base = OTHER; note = 2'- fluoro
ccttttcttctaatgagtcga

SEQ ID NO: 203 - RNA, 21 nt, synthetic construct
  source 1..21: mol_type = other RNA
  modified_base 1: mod_base = OTHER; note = 2'- fluoro, 3'- thiophosphate
  modified_base 2: mod_base = OTHER; note = 2'-O- methyl, 3'- thiophosphate
  modified_base 3: mod_base = OTHER; note = 2'- fluoro
  modified_base 4: mod_base = OTHER; note = 2'-O- methyl
  modified_base 5: mod_base = OTHER; note = 2'- fluoro
  modified_base 6: mod_base = OTHER; note = 2'-O- methyl
  modified_base 7: mod_base = OTHER; note = 2'- fluoro
  modified_base 8: mod_base = OTHER; note = 2'-O- methyl
  modified_base 9: mod_base = OTHER; note = 2'- fluoro
  modified_base 10: mod_base = OTHER; note = 2'-O- methyl
  modified_base 11: mod_base = OTHER; note = 2'- fluoro
  modified_base 12: mod_base = OTHER; note = 2'-O- methyl
  modified_base 13: mod_base = OTHER; note = 2'- fluoro
  modified_base 14: mod_base = OTHER; note = 2'-O- methyl
  modified_base 15: mod_base = OTHER; note = 2'- fluoro
  modified_base 16: mod_base = OTHER; note = 2'-O- methyl
  modified_base 17: mod_base = OTHER; note = 2'- fluoro
  modified_base 18: mod_base = OTHER; note = 2'-O- methyl
  modified_base 19: mod_base = OTHER; note = 2'- fluoro
  modified_base 20: mod_base = OTHER; note = 2'-O- methyl
  modified_base 21: mod_base = OTHER; note = 2'- fluoro
tgggttttaaaattaaagtat

SEQ ID NO: 204 - RNA, 21 nt, synthetic construct
  source 1..21: mol_type = other RNA
  modified_base 1: mod_base = OTHER; note = 2'- fluoro, 3'- thiophosphate
  modified_base 2: mod_base = OTHER; note = 2'-O- methyl, 3'- thiophosphate
  modified_base 3: mod_base = OTHER; note = 2'- fluoro
  modified_base 4: mod_base = OTHER; note = 2'-O- methyl
  modified_base 5: mod_base = OTHER; note = 2'- fluoro
  modified_base 6: mod_base = OTHER; note = 2'-O- methyl
  modified_base 7: mod_base = OTHER; note = 2'- fluoro
  modified_base 8: mod_base = OTHER; note = 2'-O- methyl
  modified_base 9: mod_base = OTHER; note = 2'- fluoro
  modified_base 10: mod_base = OTHER; note = 2'-O- methyl
  modified_base 11: mod_base = OTHER; note = 2'- fluoro
  modified_base 12: mod_base = OTHER; note = 2'-O- methyl
  modified_base 13: mod_base = OTHER; note = 2'- fluoro
  modified_base 14: mod_base = OTHER; note = 2'-O- methyl
  modified_base 15: mod_base = OTHER; note = 2'- fluoro
  modified_base 16: mod_base = OTHER; note = 2'-O- methyl
  modified_base 17: mod_base = OTHER; note = 2'- fluoro
  modified_base 18: mod_base = OTHER; note = 2'-O- methyl
  modified_base 19: mod_base = OTHER; note = 2'- fluoro
  modified_base 20: mod_base = OTHER; note = 2'-O- methyl
  modified_base 21: mod_base = OTHER; note = 2'- fluoro
gtttgtgaaacaaaaaagtgt

SEQ ID NO: 205 - RNA, 21 nt, synthetic construct
  source 1..21: mol_type = other RNA
  modified_base 1: mod_base = OTHER; note = 2'- fluoro, 3'- thiophosphate
  modified_base 2: mod_base = OTHER; note = 2'-O- methyl, 3'- thiophosphate
  modified_base 3: mod_base = OTHER; note = 2'- fluoro
  modified_base 4: mod_base = OTHER; note = 2'-O- methyl
  modified_base 5: mod_base = OTHER; note = 2'- fluoro
  modified_base 6: mod_base = OTHER; note = 2'-O- methyl
  modified_base 7: mod_base = OTHER; note = 2'- fluoro
  modified_base 8: mod_base = OTHER; note = 2'-O- methyl
  modified_base 9: mod_base = OTHER; note = 2'- fluoro
  modified_base 10: mod_base = OTHER; note = 2'-O- methyl
  modified_base 11: mod_base = OTHER; note = 2'- fluoro
  modified_base 12: mod_base = OTHER; note = 2'-O- methyl
  modified_base 13: mod_base = OTHER; note = 2'- fluoro
  modified_base 14: mod_base = OTHER; note = 2'-O- methyl
  modified_base 15: mod_base = OTHER; note = 2'- fluoro
  modified_base 16: mod_base = OTHER; note = 2'-O- methyl
  modified_base 17: mod_base = OTHER; note = 2'- fluoro
  modified_base 18: mod_base = OTHER; note = 2'-O- methyl
  modified_base 19: mod_base = OTHER; note = 2'- fluoro
  modified_base 20: mod_base = OTHER; note = 2'-O- methyl
  modified_base 21: mod_base = OTHER; note = 2'- fluoro
gttttaaaattaaagtataca

SEQ ID NO: 206 - RNA, 21 nt, synthetic construct
  source 1..21: mol_type = other RNA
  modified_base 1: mod_base = OTHER; note = 2'- fluoro, 3'- thiophosphate
  modified_base 2: mod_base = OTHER; note = 2'-O- methyl, 3'- thiophosphate
  modified_base 3: mod_base = OTHER; note = 2'- fluoro
  modified_base 4: mod_base = OTHER; note = 2'-O- methyl
  modified_base 5: mod_base = OTHER; note = 2'- fluoro
  modified_base 6: mod_base = OTHER; note = 2'-O- methyl
  modified_base 7: mod_base = OTHER; note = 2'- fluoro
  modified_base 8: mod_base = OTHER; note = 2'-O- methyl
  modified_base 9: mod_base = OTHER; note = 2'- fluoro
  modified_base 10: mod_base = OTHER; note = 2'-O- methyl
  modified_base 11: mod_base = OTHER; note = 2'- fluoro
  modified_base 12: mod_base = OTHER; note = 2'-O- methyl
  modified_base 13: mod_base = OTHER; note = 2'- fluoro
  modified_base 14: mod_base = OTHER; note = 2'-O- methyl
  modified_base 15: mod_base = OTHER; note = 2'- fluoro
  modified_base 16: mod_base = OTHER; note = 2'-O- methyl
  modified_base 17: mod_base = OTHER; note = 2'- fluoro
  modified_base 18: mod_base = OTHER; note = 2'-O- methyl
  modified_base 19: mod_base = OTHER; note = 2'- fluoro
  modified_base 20: mod_base = OTHER; note = 2'-O- methyl
  modified_base 21: mod_base = OTHER; note = 2'- fluoro
ttgtgaaacaaaaaagtgtta

SEQ ID NO: 207 - RNA, 21 nt, synthetic construct
  source 1..21: mol_type = other RNA
  modified_base 1: mod_base = OTHER; note = 2'- fluoro, 3'- thiophosphate
  modified_base 2: mod_base = OTHER; note = 2'-O- methyl, 3'- thiophosphate
  modified_base 3: mod_base = OTHER; note = 2'- fluoro
  modified_base 4: mod_base = OTHER; note = 2'-O- methyl
  modified_base 5: mod_base = OTHER; note = 2'- fluoro
  modified_base 6: mod_base = OTHER; note = 2'-O- methyl
  modified_base 7: mod_base = OTHER; note = 2'- fluoro
  modified_base 8: mod_base = OTHER; note = 2'-O- methyl
  modified_base 9: mod_base = OTHER; note = 2'- fluoro
  modified_base 10: mod_base = OTHER; note = 2'-O- methyl
  modified_base 11: mod_base = OTHER; note = 2'- fluoro
  modified_base 12: mod_base = OTHER; note = 2'-O- methyl
  modified_base 13: mod_base = OTHER; note = 2'- fluoro
  modified_base 14: mod_base = OTHER; note = 2'-O- methyl
  modified_base 15: mod_base = OTHER; note = 2'- fluoro
  modified_base 16: mod_base = OTHER; note = 2'-O- methyl
  modified_base 17: mod_base = OTHER; note = 2'- fluoro
  modified_base 18: mod_base = OTHER; note = 2'-O- methyl
  modified_base 19: mod_base = OTHER; note = 2'- fluoro
  modified_base 20: mod_base = OTHER; note = 2'-O- methyl
  modified_base 21: mod_base = OTHER; note = 2'- fluoro
gaaacaaaaaagtgttccctt

SEQ ID NO: 208 - RNA, 20 nt, synthetic construct
  source 1..20: mol_type = other RNA
  modified_base 1: mod_base = OTHER; note = 2'-O- methyl, 3'- thiophosphate
  modified_base 2: mod_base = OTHER; note = 2'- fluoro, 3'- thiophosphate
  modified_base 3: mod_base = OTHER; note = 2'-O- methyl
  modified_base 4: mod_base = OTHER; note = 2'- fluoro
  modified_base 5: mod_base = OTHER; note = 2'-O- methyl
  modified_base 6: mod_base = OTHER; note = 2'- fluoro
  modified_base 7: mod_base = OTHER; note = 2'-O- methyl
  modified_base 8: mod_base = OTHER; note = 2'- fluoro
  modified_base 9: mod_base = OTHER; note = 2'-O- methyl
  modified_base 10: mod_base = OTHER; note = 2'- fluoro
  modified_base 11: mod_base = OTHER; note = 2'-O- methyl
  modified_base 12: mod_base = OTHER; note = 2'- fluoro
  modified_base 13: mod_base = OTHER; note = 2'-O- methyl
  modified_base 14: mod_base = OTHER; note = 2'- fluoro
  modified_base 15: mod_base = OTHER; note = 2'-O- methyl
  modified_base 16: mod_base = OTHER; note = 2'- fluoro
  modified_base 17: mod_base = OTHER; note = 2'-O- methyl
  modified_base 18: mod_base = OTHER; note = 2'- fluoro
  modified_base 19: mod_base = OTHER; note = 2'-O- methyl
  modified_base 20: mod_base = OTHER; note = 2'- fluoro
cttctaatgagtcgacttta

SEQ ID NO: 209 - RNA, 20 nt, synthetic construct
  source 1..20: mol_type = other RNA
  modified_base 1: mod_base = OTHER; note = 2'-O- methyl, 3'- thiophosphate
  modified_base 2: mod_base = OTHER; note = 2'- fluoro, 3'- thiophosphate
  modified_base 3: mod_base = OTHER; note = 2'-O- methyl
  modified_base 4: mod_base = OTHER; note = 2'- fluoro
  modified_base 5: mod_base = OTHER; note = 2'-O- methyl
  modified_base 6: mod_base = OTHER; note = 2'- fluoro
  modified_base 7: mod_base = OTHER; note = 2'-O- methyl
  modified_base 8: mod_base = OTHER; note = 2'- fluoro
  modified_base 9: mod_base = OTHER; note = 2'-O- methyl
  modified_base 10: mod_base = OTHER; note = 2'- fluoro
  modified_base 11: mod_base = OTHER; note = 2'-O- methyl
  modified_base 12: mod_base = OTHER; note = 2'- fluoro
  modified_base 13: mod_base = OTHER; note = 2'-O- methyl
  modified_base 14: mod_base = OTHER; note = 2'- fluoro
  modified_base 15: mod_base = OTHER; note = 2'-O- methyl
  modified_base 16: mod_base = OTHER; note = 2'- fluoro
  modified_base 17: mod_base = OTHER; note = 2'-O- methyl
  modified_base 18: mod_base = OTHER; note = 2'- fluoro
  modified_base 19: mod_base = OTHER; note = 2'-O- methyl
  modified_base 20: mod_base = OTHER; note = 2'- fluoro
ccaccttttcttctaatgaa

SEQ ID NO: 210 - RNA, 20 nt, synthetic construct
  source 1..20: mol_type = other RNA
  modified_base 1: mod_base = OTHER; note = 2'-O- methyl, 3'- thiophosphate
  modified_base 2: mod_base = OTHER; note = 2'- fluoro, 3'- thiophosphate
  modified_base 3: mod_base = OTHER; note = 2'-O- methyl
  modified_base 4: mod_base = OTHER; note = 2'- fluoro
  modified_base 5: mod_base = OTHER; note = 2'-O- methyl
  modified_base 6: mod_base = OTHER; note = 2'- fluoro
  modified_base 7: mod_base = OTHER; note = 2'-O- methyl
  modified_base 8: mod_base = OTHER; note = 2'- fluoro
  modified_base 9: mod_base = OTHER; note = 2'-O- methyl
  modified_base 10: mod_base = OTHER; note = 2'- fluoro
  modified_base 11: mod_base = OTHER; note = 2'-O- methyl
  modified_base 12: mod_base = OTHER; note = 2'- fluoro
  modified_base 13: mod_base = OTHER; note = 2'-O- methyl
  modified_base 14: mod_base = OTHER; note = 2'- fluoro
  modified_base 15: mod_base = OTHER; note = 2'-O- methyl
  modified_base 16: mod_base = OTHER; note = 2'- fluoro
  modified_base 17: mod_base = OTHER; note = 2'-O- methyl
  modified_base 18: mod_base = OTHER; note = 2'- fluoro
  modified_base 19: mod_base = OTHER; note = 2'-O- methyl
  modified_base 20: mod_base = OTHER; note = 2'- fluoro
accttttcttctaatgagta

SEQ ID NO: 211 - RNA, 21 nt, synthetic construct
  source 1..21: mol_type = other RNA
  modified_base 1: mod_base = OTHER; note = 2'- fluoro, 3'- thiophosphate
  modified_base 2: mod_base = OTHER; note = 2'-O- methyl, 3'- thiophosphate
  modified_base 3: mod_base = OTHER; note = 2'- fluoro
  modified_base 4: mod_base = OTHER; note = 2'-O- methyl
  modified_base 5: mod_base = OTHER; note = 2'- fluoro
  modified_base 6: mod_base = OTHER; note = 2'-O- methyl
  modified_base 7: mod_base = OTHER; note = 2'- fluoro
  modified_base 8: mod_base = OTHER; note = 2'-O- methyl
  modified_base 9: mod_base = OTHER; note = 2'- fluoro
  modified_base 10: mod_base = OTHER; note = 2'-O- methyl
  modified_base 11: mod_base = OTHER; note = 2'- fluoro
  modified_base 12: mod_base = OTHER; note = 2'-O- methyl
  modified_base 13: mod_base = OTHER; note = 2'- fluoro
  modified_base 14: mod_base = OTHER; note = 2'-O- methyl
  modified_base 15: mod_base = OTHER; note = 2'- fluoro
  modified_base 16: mod_base = OTHER; note = 2'-O- methyl
  modified_base 17: mod_base = OTHER; note = 2'- fluoro
  modified_base 18: mod_base = OTHER; note = 2'-O- methyl
  modified_base 19: mod_base = OTHER; note = 2'- fluoro
  modified_base 20: mod_base = OTHER; note = 2'-O- methyl
  modified_base 21: mod_base = OTHER; note = 2'- fluoro
ggttttaaaattaaagtataa

SEQ ID NO: 212 - RNA, 23 nt, synthetic construct
  source 1..23: mol_type = other RNA
  modified_base 1: mod_base = OTHER; note = 2'-O- methyl, 3'- thiophosphate
  modified_base 2: mod_base = OTHER; note = 2'- fluoro, 3'- thiophosphate
  modified_base 3: mod_base = OTHER; note = 2'-O- methyl
  modified_base 4: mod_base = OTHER; note = 2'- fluoro
  modified_base 5: mod_base = OTHER; note = 2'-O- methyl
  modified_base 6: mod_base = OTHER; note = 2'- fluoro
  modified_base 7: mod_base = OTHER; note = 2'-O- methyl
  modified_base 8: mod_base = OTHER; note = 2'- fluoro
  modified_base 9: mod_base = OTHER; note = 2'-O- methyl
  modified_base 10: mod_base = OTHER; note = 2'- fluoro
  modified_base 11: mod_base = OTHER; note = 2'-O- methyl
  modified_base 12: mod_base = OTHER; note = 2'- fluoro
  modified_base 13: mod_base = OTHER; note = 2'-O- methyl
  modified_base 14: mod_base = OTHER; note = 2'- fluoro
  modified_base 15: mod_base = OTHER; note = 2'-O- methyl
  modified_base 16: mod_base = OTHER; note = 2'- fluoro
  modified_base 17: mod_base = OTHER; note = 2'-O- methyl
  modified_base 18: mod_base = OTHER; note = 2'- fluoro
  modified_base 19: mod_base = OTHER; note = 2'-O- methyl
  modified_base 20: mod_base = OTHER; note = 2'- fluoro
  modified_base 21: mod_base = OTHER; note = 2'-O- methyl, 3'- thiophosphate
  modified_base 22: mod_base = OTHER; note = 2'- fluoro, 3'- thiophosphate
  modified_base 23: mod_base = OTHER; note = 2'-O- methyl
tactttaattttaaaacccaatt

SEQ ID NO: 213 - RNA, 23 nt, synthetic construct
  source 1..23: mol_type = other RNA
  modified_base 1: mod_base = OTHER; note = 2'-O- methyl, 3'- thiophosphate
  modified_base 2: mod_base = OTHER; note = 2'- fluoro, 3'- thiophosphate
  modified_base 3: mod_base = OTHER; note = 2'-O- methyl
  modified_base 4: mod_base = OTHER; note = 2'- fluoro
  modified_base 5: mod_base = OTHER; note = 2'-O- methyl
  modified_base 6: mod_base = OTHER; note = 2'- fluoro
  modified_base 7: mod_base = OTHER; note = 2'-O- methyl
  modified_base 8: mod_base = OTHER; note = 2'- fluoro
  modified_base 9: mod_base = OTHER; note = 2'-O- methyl
  modified_base 10: mod_base = OTHER; note = 2'- fluoro
  modified_base 11: mod_base = OTHER; note = 2'-O- methyl
  modified_base 12: mod_base = OTHER; note = 2'- fluoro
  modified_base 13: mod_base = OTHER; note = 2'-O- methyl
  modified_base 14: mod_base = OTHER; note = 2'- fluoro
  modified_base 15: mod_base = OTHER; note = 2'-O- methyl
  modified_base 16: mod_base = OTHER; note = 2'- fluoro
  modified_base 17: mod_base = OTHER; note = 2'-O- methyl
  modified_base 18: mod_base = OTHER; note = 2'- fluoro
  modified_base 19: mod_base = OTHER; note = 2'-O- methyl
  modified_base 20: mod_base = OTHER; note = 2'- fluoro
  modified_base 21: mod_base = OTHER; note = 2'-O- methyl, 3'- thiophosphate
  modified_base 22: mod_base = OTHER; note = 2'- fluoro, 3'- thiophosphate
  modified_base 23: mod_base = OTHER; note = 2'-O- methyl
aatttttgttctcaacttgaaaa

SEQ ID NO: 214 - RNA, 23 nt, synthetic construct
  source 1..23: mol_type = other RNA
  modified_base 1: mod_base = OTHER; note = 2'-O- methyl, 3'- thiophosphate
  modified_base 2: mod_base = OTHER; note = 2'- fluoro, 3'- thiophosphate
  modified_base 3: mod_base = OTHER; note = 2'-O- methyl
  modified_base 4: mod_base = OTHER; note = 2'- fluoro
  modified_base 5: mod_base = OTHER; note = 2'-O- methyl
  modified_base 6: mod_base = OTHER; note = 2'- fluoro
  modified_base 7: mod_base = OTHER; note = 2'-O- methyl
  modified_base 8: mod_base = OTHER; note = 2'- fluoro
  modified_base 9: mod_base = OTHER; note = 2'-O- methyl
  modified_base 10: mod_base = OTHER; note = 2'- fluoro
  modified_base 11: mod_base = OTHER; note = 2'-O- methyl
  modified_base 12: mod_base = OTHER; note = 2'- fluoro
  modified_base 13: mod_base = OTHER; note = 2'-O- methyl
  modified_base 14: mod_base = OTHER; note = 2'- fluoro
  modified_base 15: mod_base = OTHER; note = 2'-O- methyl
  modified_base 16: mod_base = OTHER; note = 2'- fluoro
  modified_base 17: mod_base = OTHER; note = 2'-O- methyl
  modified_base 18: mod_base = OTHER; note = 2'- fluoro
  modified_base 19: mod_base = OTHER; note = 2'-O- methyl
  modified_base 20: mod_base = OTHER; note = 2'- fluoro
  modified_base 21: mod_base = OTHER; note = 2'-O- methyl, 3'- thiophosphate
  modified_base 22: mod_base = OTHER; note = 2'- fluoro, 3'- thiophosphate
  modified_base 23: mod_base = OTHER; note = 2'-O- methyl
tttgttctcaacttgaaaaggga

SEQ ID NO: 215 - RNA, 23 nt, synthetic construct
  source 1..23: mol_type = other RNA
  modified_base 1: mod_base = OTHER; note = 2'-O- methyl, 3'- thiophosphate
  modified_base 2: mod_base = OTHER; note = 2'- fluoro, 3'- thiophosphate
  modified_base 3: mod_base = OTHER; note = 2'-O- methyl
  modified_base 4: mod_base = OTHER; note = 2'- fluoro
  modified_base 5: mod_base = OTHER; note = 2'-O- methyl
  modified_base 6: mod_base = OTHER; note = 2'- fluoro
  modified_base 7: mod_base = OTHER; note = 2'-O- methyl
  modified_base 8: mod_base = OTHER; note = 2'- fluoro
  modified_base 9: mod_base = OTHER; note = 2'-O- methyl
  modified_base 10: mod_base = OTHER; note = 2'- fluoro
  modified_base 11: mod_base = OTHER; note = 2'-O- methyl
  modified_base 12: mod_base = OTHER; note = 2'- fluoro
  modified_base 13: mod_base = OTHER; note = 2'-O- methyl
  modified_base 14: mod_base = OTHER; note = 2'- fluoro
  modified_base 15: mod_base = OTHER; note = 2'-O- methyl
  modified_base 16: mod_base = OTHER; note = 2'- fluoro
  modified_base 17: mod_base = OTHER; note = 2'-O- methyl
  modified_base 18: mod_base = OTHER; note = 2'- fluoro
  modified_base 19: mod_base = OTHER; note = 2'-O- methyl
  modified_base 20: mod_base = OTHER; note = 2'- fluoro
  modified_base 21: mod_base = OTHER; note = 2'-O- methyl, 3'- thiophosphate
  modified_base 22: mod_base = OTHER; note = 2'- fluoro, 3'- thiophosphate
  modified_base 23: mod_base = OTHER; note = 2'-O- methyl
tcgactcattagaagaaaaggtg

SEQ ID NO: 216 - RNA, 23 nt, synthetic construct
  source 1..23: mol_type = other RNA
  modified_base 1: mod_base = OTHER; note = 2'-O- methyl, 3'- thiophosphate
  modified_base 2: mod_base = OTHER; note = 2'- fluoro, 3'- thiophosphate
  modified_base 3: mod_base = OTHER; note = 2'-O- methyl
  modified_base 4: mod_base = OTHER; note = 2'- fluoro
  modified_base 5: mod_base = OTHER; note = 2'-O- methyl
  modified_base 6: mod_base = OTHER; note = 2'- fluoro
  modified_base 7: mod_base = OTHER; note = 2'-O- methyl
  modified_base 8: mod_base = OTHER; note = 2'- fluoro
  modified_base 9: mod_base = OTHER; note = 2'-O- methyl
  modified_base 10: mod_base = OTHER; note = 2'- fluoro
  modified_base 11: mod_base = OTHER; note = 2'-O- methyl
  modified_base 12: mod_base = OTHER; note = 2'- fluoro
  modified_base 13: mod_base = OTHER; note = 2'-O- methyl
  modified_base 14: mod_base = OTHER; note = 2'- fluoro
  modified_base 15: mod_base = OTHER; note = 2'-O- methyl
  modified_base 16: mod_base = OTHER; note = 2'- fluoro
  modified_base 17: mod_base = OTHER; note = 2'-O- methyl
  modified_base 18: mod_base = OTHER; note = 2'- fluoro
  modified_base 19: mod_base = OTHER; note = 2'-O- methyl
  modified_base 20: mod_base = OTHER; note = 2'- fluoro
  modified_base 21: mod_base = OTHER; note = 2'-O- methyl, 3'- thiophosphate
  modified_base 22: mod_base = OTHER; note = 2'- fluoro, 3'- thiophosphate
  modified_base 23: mod_base = OTHER; note = 2'-O- methyl
atactttaattttaaaacccaat

SEQ ID NO: 217 - RNA, 23 nt, synthetic construct
  source 1..23: mol_type = other RNA
  modified_base 1: mod_base = OTHER; note = 2'-O- methyl, 3'- thiophosphate
  modified_base 2: mod_base = OTHER; note = 2'- fluoro, 3'- thiophosphate
  modified_base 3: mod_base = OTHER; note = 2'-O- methyl
  modified_base 4: mod_base = OTHER; note = 2'- fluoro
  modified_base 5: mod_base = OTHER; note = 2'-O- methyl
  modified_base 6: mod_base = OTHER; note = 2'- fluoro
  modified_base 7: mod_base = OTHER; note = 2'-O- methyl
  modified_base 8: mod_base = OTHER; note = 2'- fluoro
  modified_base 9: mod_base = OTHER; note = 2'-O- methyl
  modified_base 10: mod_base = OTHER; note = 2'- fluoro
  modified_base 11: mod_base = OTHER; note = 2'-O- methyl
  modified_base 12: mod_base = OTHER; note = 2'- fluoro
  modified_base 13: mod_base = OTHER; note = 2'-O- methyl
  modified_base 14: mod_base = OTHER; note = 2'- fluoro
  modified_base 15: mod_base = OTHER; note = 2'-O- methyl
  modified_base 16: mod_base = OTHER; note = 2'- fluoro
  modified_base 17: mod_base = OTHER; note = 2'-O- methyl
  modified_base 18: mod_base = OTHER; note = 2'- fluoro
  modified_base 19: mod_base = OTHER; note = 2'-O- methyl
  modified_base 20: mod_base = OTHER; note = 2'- fluoro
  modified_base 21: mod_base = OTHER; note = 2'-O- methyl, 3'- thiophosphate
  modified_base 22: mod_base = OTHER; note = 2'- fluoro, 3'- thiophosphate
  modified_base 23: mod_base = OTHER; note = 2'-O- methyl
acacttttttgtttcacaaacaa

SEQ ID NO: 218 - RNA, 23 nt, synthetic construct
  source 1..23: mol_type = other RNA
  modified_base 1: mod_base = OTHER; note = 2'-O- methyl, 3'- thiophosphate
  modified_base 2: mod_base = OTHER; note = 2'- fluoro, 3'- thiophosphate
  modified_base 3: mod_base = OTHER; note = 2'-O- methyl
  modified_base 4: mod_base = OTHER; note = 2'- fluoro
  modified_base 5: mod_base = OTHER; note = 2'-O- methyl
  modified_base 6: mod_base = OTHER; note = 2'- fluoro
  modified_base 7: mod_base = OTHER; note = 2'-O- methyl
  modified_base 8: mod_base = OTHER; note = 2'- fluoro
  modified_base 9: mod_base = OTHER; note = 2'-O- methyl
  modified_base 10: mod_base = OTHER; note = 2'- fluoro
  modified_base 11: mod_base = OTHER; note = 2'-O- methyl
  modified_base 12: mod_base = OTHER; note = 2'- fluoro
  modified_base 13: mod_base = OTHER; note = 2'-O- methyl
  modified_base 14: mod_base = OTHER; note = 2'- fluoro
  modified_base 15: mod_base = OTHER; note = 2'-O- methyl
  modified_base 16: mod_base = OTHER; note = 2'- fluoro
  modified_base 17: mod_base = OTHER; note = 2'-O- methyl
  modified_base 18: mod_base = OTHER; note = 2'- fluoro
  modified_base 19: mod_base = OTHER; note = 2'-O- methyl
  modified_base 20: mod_base = OTHER; note = 2'- fluoro
  modified_base 21: mod_base = OTHER; note = 2'-O- methyl, 3'- thiophosphate
  modified_base 22: mod_base = OTHER; note = 2'- fluoro, 3'- thiophosphate
  modified_base 23: mod_base = OTHER; note = 2'-O- methyl
tgtatactttaattttaaaaccc

SEQ ID NO: 219 - RNA, 23 nt, synthetic construct
  source 1..23: mol_type = other RNA
  modified_base 1: mod_base = OTHER; note = 2'-O- methyl, 3'- thiophosphate
  modified_base 2: mod_base = OTHER; note = 2'- fluoro, 3'- thiophosphate
  modified_base 3: mod_base = OTHER; note = 2'-O- methyl
  modified_base 4: mod_base = OTHER; note = 2'- fluoro
  modified_base 5: mod_base = OTHER; note = 2'-O- methyl
  modified_base 6: mod_base = OTHER; note = 2'- fluoro
  modified_base 7: mod_base = OTHER; note = 2'-O- methyl
  modified_base 8: mod_base = OTHER; note = 2'- fluoro
  modified_base 9: mod_base = OTHER; note = 2'-O- methyl
  modified_base 10: mod_base = OTHER; note = 2'- fluoro
  modified_base 11: mod_base = OTHER; note = 2'-O- methyl
  modified_base 12: mod_base = OTHER; note = 2'- fluoro
  modified_base 13: mod_base = OTHER; note = 2'-O- methyl
  modified_base 14: mod_base = OTHER; note = 2'- fluoro
  modified_base 15: mod_base = OTHER; note = 2'-O- methyl
  modified_base 16: mod_base = OTHER; note = 2'- fluoro
  modified_base 17: mod_base = OTHER; note = 2'-O- methyl
  modified_base 18: mod_base = OTHER; note = 2'- fluoro
  modified_base 19: mod_base = OTHER; note = 2'-O- methyl
  modified_base 20: mod_base = OTHER; note = 2'- fluoro
  modified_base 21: mod_base = OTHER; note = 2'-O- methyl, 3'- thiophosphate
  modified_base 22: mod_base = OTHER; note = 2'- fluoro, 3'- thiophosphate
  modified_base 23: mod_base = OTHER; note = 2'-O- methyl
taacacttttttgtttcacaaac

SEQ ID NO: 220 - RNA, 23 nt, synthetic construct
  source 1..23: mol_type = other RNA
  modified_base 1: mod_base = OTHER; note = 2'-O- methyl, 3'- thiophosphate
  modified_base 2: mod_base = OTHER; note = 2'- fluoro, 3'- thiophosphate
  modified_base 3: mod_base = OTHER; note = 2'-O- methyl
  modified_base 4: mod_base = OTHER; note = 2'- fluoro
  modified_base 5: mod_base = OTHER; note = 2'-O- methyl
  modified_base 6: mod_base = OTHER; note = 2'- fluoro
  modified_base 7: mod_base = OTHER; note = 2'-O- methyl
  modified_base 8: mod_base = OTHER; note = 2'- fluoro
  modified_base 9: mod_base = OTHER; note = 2'-O- methyl
  modified_base 10: mod_base = OTHER; note = 2'- fluoro
  modified_base 11: mod_base = OTHER; note = 2'-O- methyl
  modified_base 12: mod_base = OTHER; note = 2'- fluoro
  modified_base 13: mod_base = OTHER; note = 2'-O- methyl
  modified_base 14: mod_base = OTHER; note = 2'- fluoro
  modified_base 15: mod_base = OTHER; note = 2'-O- methyl
  modified_base 16: mod_base = OTHER; note = 2'- fluoro
  modified_base 17: mod_base = OTHER; note = 2'-O- methyl
  modified_base 18: mod_base = OTHER; note = 2'- fluoro
  modified_base 19: mod_base = OTHER; note = 2'-O- methyl
  modified_base 20: mod_base = OTHER; note = 2'- fluoro
  modified_base 21: mod_base = OTHER; note = 2'-O- methyl, 3'- thiophosphate
  modified_base 22: mod_base = OTHER; note = 2'- fluoro, 3'- thiophosphate
  modified_base 23: mod_base = OTHER; note = 2'-O- methyl
aagggaacacttttttgtttcac

SEQ ID NO: 221 - RNA, 22 nt, synthetic construct
  source 1..22: mol_type = other RNA
  modified_base 1: mod_base = OTHER; note = 2'-O- methyl, 3'- thiophosphate
  modified_base 2: mod_base = OTHER; note = 2'- fluoro, 3'- thiophosphate
  modified_base 3: mod_base = OTHER; note = 2'-O- methyl
  modified_base 4: mod_base = OTHER; note = 2'- fluoro
  modified_base 5: mod_base = OTHER; note = 2'-O- methyl
  modified_base 6: mod_base = OTHER; note = 2'- fluoro
  modified_base 7: mod_base = OTHER; note = 2'-O- methyl
  modified_base 8: mod_base = OTHER; note = 2'- fluoro
  modified_base 9: mod_base = OTHER; note = 2'-O- methyl
  modified_base 10: mod_base = OTHER; note = 2'- fluoro
  modified_base 11: mod_base = OTHER; note = 2'-O- methyl
  modified_base 12: mod_base = OTHER; note = 2'- fluoro
  modified_base 13: mod_base = OTHER; note = 2'-O- methyl
  modified_base 14: mod_base = OTHER; note = 2'- fluoro
  modified_base 15: mod_base = OTHER; note = 2'-O- methyl
  modified_base 16: mod_base = OTHER; note = 2'- fluoro
  modified_base 17: mod_base = OTHER; note = 2'-O- methyl
  modified_base 18: mod_base = OTHER; note = 2'- fluoro
  modified_base 19: mod_base = OTHER; note = 2'-O- methyl
  modified_base 20: mod_base = OTHER; note = 2'- fluoro, 3'- thiophosphate
  modified_base 21: mod_base = OTHER; note = 2'-O- methyl, 3'- thiophosphate
  modified_base 22: mod_base = OTHER; note = 2'- fluoro
taaagtcgactcattagaagaa

SEQ ID NO: 222 - RNA, 22 nt, synthetic construct
  source 1..22: mol_type = other RNA
  modified_base 1: mod_base = OTHER; note = 2'-O- methyl, 3'- thiophosphate
  modified_base 2: mod_base = OTHER; note = 2'- fluoro, 3'- thiophosphate
  modified_base 3: mod_base = OTHER; note = 2'-O- methyl
  modified_base 4: mod_base = OTHER; note = 2'- fluoro
  modified_base 5: mod_base = OTHER; note = 2'-O- methyl
  modified_base 6: mod_base = OTHER; note = 2'- fluoro
  modified_base 7: mod_base = OTHER; note = 2'-O- methyl
  modified_base 8: mod_base = OTHER; note = 2'- fluoro
  modified_base 9: mod_base = OTHER; note = 2'-O- methyl
  modified_base 10: mod_base = OTHER; note = 2'- fluoro
  modified_base 11: mod_base = OTHER; note = 2'-O- methyl
  modified_base 12: mod_base = OTHER; note = 2'- fluoro
  modified_base 13: mod_base = OTHER; note = 2'-O- methyl
  modified_base 14: mod_base = OTHER; note = 2'- fluoro
  modified_base 15: mod_base = OTHER; note = 2'-O- methyl
  modified_base 16: mod_base = OTHER; note = 2'- fluoro
  modified_base 17: mod_base = OTHER; note = 2'-O- methyl
  modified_base 18: mod_base = OTHER; note = 2'- fluoro
  modified_base 19: mod_base = OTHER; note = 2'-O- methyl
  modified_base 20: mod_base = OTHER; note = 2'- fluoro, 3'- thiophosphate
  modified_base 21: mod_base = OTHER; note = 2'-O- methyl, 3'- thiophosphate
  modified_base 22: mod_base = OTHER; note = 2'- fluoro
ttcattagaagaaaaggtggga

SEQ ID NO: 223 - RNA, 22 nt, synthetic construct
  source 1..22: mol_type = other RNA
  modified_base 1: mod_base = OTHER; note = 2'-O- methyl, 3'- thiophosphate
  modified_base 2: mod_base = OTHER; note = 2'- fluoro, 3'- thiophosphate
  modified_base 3: mod_base = OTHER; note = 2'-O- methyl
  modified_base 4: mod_base = OTHER; note = 2'- fluoro
  modified_base 5: mod_base = OTHER; note = 2'-O- methyl
  modified_base 6: mod_base = OTHER; note = 2'- fluoro
  modified_base 7: mod_base = OTHER; note = 2'-O- methyl
  modified_base 8: mod_base = OTHER; note = 2'- fluoro
  modified_base 9: mod_base = OTHER; note = 2'-O- methyl
  modified_base 10: mod_base = OTHER; note = 2'- fluoro
  modified_base 11: mod_base = OTHER; note = 2'-O- methyl
  modified_base 12: mod_base = OTHER; note = 2'- fluoro
  modified_base 13: mod_base = OTHER; note = 2'-O- methyl
  modified_base 14: mod_base = OTHER; note = 2'- fluoro
  modified_base 15: mod_base = OTHER; note = 2'-O- methyl
  modified_base 16: mod_base = OTHER; note = 2'- fluoro
  modified_base 17: mod_base = OTHER; note = 2'-O- methyl
  modified_base 18: mod_base = OTHER; note = 2'- fluoro
  modified_base 19: mod_base = OTHER; note = 2'-O- methyl
  modified_base 20: mod_base = OTHER; note = 2'- fluoro, 3'- thiophosphate
  modified_base 21: mod_base = OTHER; note = 2'-O- methyl, 3'- thiophosphate
  modified_base 22: mod_base = OTHER; note = 2'- fluoro
tactcattagaagaaaaggtgg

SEQ ID NO: 224 - RNA, 23 nt, synthetic construct
  source 1..23: mol_type = other RNA
  modified_base 1: mod_base = OTHER; note = 2'-O- methyl, 3'- thiophosphate
  modified_base 2: mod_base = OTHER; note = 2'- fluoro, 3'- thiophosphate
  modified_base 3: mod_base = OTHER; note = 2'-O- methyl
  modified_base 4: mod_base = OTHER; note = 2'- fluoro
  modified_base 5: mod_base = OTHER; note = 2'-O- methyl
  modified_base 6: mod_base = OTHER; note = 2'- fluoro
  modified_base 7: mod_base = OTHER; note = 2'-O- methyl
  modified_base 8: mod_base = OTHER; note = 2'- fluoro
  modified_base 9: mod_base = OTHER; note = 2'-O- methyl
  modified_base 10: mod_base = OTHER; note = 2'- fluoro
  modified_base 11: mod_base = OTHER; note = 2'-O- methyl
  modified_base 12: mod_base = OTHER; note = 2'- fluoro
  modified_base 13: mod_base = OTHER; note = 2'-O- methyl
  modified_base 14: mod_base = OTHER; note = 2'- fluoro
  modified_base 15: mod_base = OTHER; note = 2'-O- methyl
  modified_base 16: mod_base = OTHER; note = 2'- fluoro
  modified_base 17: mod_base = OTHER; note = 2'-O- methyl
  modified_base 18: mod_base = OTHER; note = 2'- fluoro
  modified_base 19: mod_base = OTHER; note = 2'-O- methyl
  modified_base 20: mod_base = OTHER; note = 2'- fluoro
  modified_base 21: mod_base = OTHER; note = 2'-O- methyl, 3'- thiophosphate
  modified_base 22: mod_base = OTHER; note = 2'- fluoro, 3'- thiophosphate
  modified_base 23: mod_base = OTHER; note = 2'-O- methyl
ttatactttaattttaaaaccca

SEQ ID NO: 225 - RNA, 21 nt, synthetic construct
  source 1..21: mol_type = other RNA
  modified_base 1: mod_base = OTHER; note = 2'- fluoro, 3'- thiophosphate
  modified_base 2: mod_base = OTHER; note = 2'-O- methyl, 3'- thiophosphate
  modified_base 3: mod_base = OTHER; note = 2'- fluoro
  modified_base 4: mod_base = OTHER; note = 2'-O- methyl
  modified_base 5: mod_base = OTHER; note = 2'- fluoro
  modified_base 6: mod_base = OTHER; note = 2'-O- methyl
  modified_base 7: mod_base = OTHER; note = 2'- fluoro
  modified_base 8: mod_base = OTHER; note = 2'-O- methyl
  modified_base 9: mod_base = OTHER; note = 2'- fluoro
  modified_base 10: mod_base = OTHER; note = 2'-O- methyl
  modified_base 11: mod_base = OTHER; note = 2'- fluoro
  modified_base 12: mod_base = OTHER; note = 2'-O- methyl
  modified_base 13: mod_base = OTHER; note = 2'- fluoro
  modified_base 14: mod_base = OTHER; note = 2'-O- methyl
  modified_base 15: mod_base = OTHER; note = 2'- fluoro
  modified_base 16: mod_base = OTHER; note = 2'-O- methyl
  modified_base 17: mod_base = OTHER; note = 2'- fluoro
  modified_base 18: mod_base = OTHER; note = 2'-O- methyl
  modified_base 19: mod_base = OTHER; note = 2'- fluoro
  modified_base 20: mod_base = OTHER; note = 2'-O- methyl
  modified_base 21: mod_base = OTHER; note = 2'- fluoro
cttcactgagagcgcctgcct

SEQ ID NO: 226 - RNA, 21 nt, synthetic construct
  source 1..21: mol_type = other RNA
  modified_base 1: mod_base = OTHER; note = 2'- fluoro, 3'- thiophosphate
  modified_base 2: mod_base = OTHER; note = 2'-O- methyl, 3'- thiophosphate
  modified_base 3: mod_base = OTHER; note = 2'- fluoro
  modified_base 4: mod_base = OTHER; note = 2'-O- methyl
  modified_base 5: mod_base = OTHER; note = 2'- fluoro
  modified_base 6: mod_base = OTHER; note = 2'-O- methyl
  modified_base 7: mod_base = OTHER; note = 2'- fluoro
  modified_base 8: mod_base = OTHER; note = 2'-O- methyl
  modified_base 9: mod_base = OTHER; note = 2'- fluoro
  modified_base 10: mod_base = OTHER; note = 2'-O- methyl
  modified_base 11: mod_base = OTHER; note = 2'- fluoro
  modified_base 12: mod_base = OTHER; note = 2'-O- methyl
  modified_base 13: mod_base = OTHER; note = 2'- fluoro
  modified_base 14: mod_base = OTHER; note = 2'-O- methyl
  modified_base 15: mod_base = OTHER; note = 2'- fluoro
  modified_base 16: mod_base = OTHER; note = 2'-O- methyl
  modified_base 17: mod_base = OTHER; note = 2'- fluoro
  modified_base 18: mod_base = OTHER; note = 2'-O- methyl
  modified_base 19: mod_base = OTHER; note = 2'- fluoro
  modified_base 20: mod_base = OTHER; note = 2'-O- methyl
  modified_base 21: mod_base = OTHER; note = 2'- fluoro
cactgagagcgcctgcctgct

SEQ ID NO: 227 - RNA, 21 nt, synthetic construct
  source 1..21: mol_type = other RNA
  modified_base 1: mod_base = OTHER; note = 2'- fluoro, 3'- thiophosphate
  modified_base 2: mod_base = OTHER; note = 2'-O- methyl, 3'- thiophosphate
  modified_base 3: mod_base = OTHER; note = 2'- fluoro
  modified_base 4: mod_base = OTHER; note = 2'-O- methyl
  modified_base 5: mod_base = OTHER; note = 2'- fluoro
  modified_base 6: mod_base = OTHER; note = 2'-O- methyl
  modified_base 7: mod_base = OTHER; note = 2'- fluoro
  modified_base 8: mod_base = OTHER; note = 2'-O- methyl
  modified_base 9: mod_base = OTHER; note = 2'- fluoro
  modified_base 10: mod_base = OTHER; note = 2'-O- methyl
  modified_base 11: mod_base = OTHER; note = 2'- fluoro
  modified_base 12: mod_base = OTHER; note = 2'-O- methyl
  modified_base 13: mod_base = OTHER; note = 2'- fluoro
  modified_base 14: mod_base = OTHER; note = 2'-O- methyl
  modified_base 15: mod_base = OTHER; note = 2'- fluoro
  modified_base 16: mod_base = OTHER; note = 2'-O- methyl
  modified_base 17: mod_base = OTHER; note = 2'- fluoro
  modified_base 18: mod_base = OTHER; note = 2'-O- methyl
  modified_base 19: mod_base = OTHER; note = 2'- fluoro
  modified_base 20: mod_base = OTHER; note = 2'-O- methyl
  modified_base 21: mod_base = OTHER; note = 2'- fluoro
tgagagcgcctgcctgctgct

SEQ ID NO: 228 - RNA, 21 nt, synthetic construct
  source 1..21: mol_type = other RNA
  modified_base 1: mod_base = OTHER; note = 2'- fluoro, 3'- thiophosphate
  modified_base 2: mod_base = OTHER; note = 2'-O- methyl, 3'- thiophosphate
  modified_base 3: mod_base = OTHER; note = 2'- fluoro
  modified_base 4: mod_base = OTHER; note = 2'-O- methyl
  modified_base 5: mod_base = OTHER; note = 2'- fluoro
  modified_base 6: mod_base = OTHER; note = 2'-O- methyl
  modified_base 7: mod_base = OTHER; note = 2'- fluoro
  modified_base 8: mod_base = OTHER; note = 2'-O- methyl
  modified_base 9: mod_base = OTHER; note = 2'- fluoro
  modified_base 10: mod_base = OTHER; note = 2'-O- methyl
  modified_base 11: mod_base = OTHER; note = 2'- fluoro
  modified_base 12: mod_base = OTHER; note = 2'-O- methyl
  modified_base 13: mod_base = OTHER; note = 2'- fluoro
  modified_base 14: mod_base = OTHER; note = 2'-O- methyl
  modified_base 15: mod_base = OTHER; note = 2'- fluoro
  modified_base 16: mod_base = OTHER; note = 2'-O- methyl
  modified_base 17: mod_base = OTHER; note = 2'- fluoro
  modified_base 18: mod_base = OTHER; note = 2'-O- methyl
  modified_base 19: mod_base = OTHER; note = 2'- fluoro
  modified_base 20: mod_base = OTHER; note = 2'-O- methyl
  modified_base 21: mod_base = OTHER; note = 2'- fluoro
agagcgcctgcctgctgctga

SEQ ID NO: 229 - RNA, 21 nt, synthetic construct
  source 1..21: mol_type = other RNA
  modified_base 1: mod_base = OTHER; note = 2'- fluoro, 3'- thiophosphate
  modified_base 2: mod_base = OTHER; note = 2'-O- methyl, 3'- thiophosphate
  modified_base 3: mod_base = OTHER; note = 2'- fluoro
  modified_base 4: mod_base = OTHER; note = 2'-O- methyl
  modified_base 5: mod_base = OTHER; note = 2'- fluoro
  modified_base 6: mod_base = OTHER; note = 2'-O- methyl
  modified_base 7: mod_base = OTHER; note = 2'- fluoro
  modified_base 8: mod_base = OTHER; note = 2'-O- methyl
  modified_base 9: mod_base = OTHER; note = 2'- fluoro
  modified_base 10: mod_base = OTHER; note = 2'-O- methyl
  modified_base 11: mod_base = OTHER; note = 2'- fluoro
  modified_base 12: mod_base = OTHER; note = 2'-O- methyl
  modified_base 13: mod_base = OTHER; note = 2'- fluoro
  modified_base 14: mod_base = OTHER; note = 2'-O- methyl
  modified_base 15: mod_base = OTHER; note = 2'- fluoro
  modified_base 16: mod_base = OTHER; note = 2'-O- methyl
  modified_base 17: mod_base = OTHER; note = 2'- fluoro
  modified_base 18: mod_base = OTHER; note = 2'-O- methyl
  modified_base 19: mod_base = OTHER; note = 2'- fluoro
  modified_base 20: mod_base = OTHER; note = 2'-O- methyl
  modified_base 21: mod_base = OTHER; note = 2'- fluoro
gagcgcctgcctgctgctgat

SEQ ID NO: 230 - RNA, 21 nt, synthetic construct
  source 1..21: mol_type = other RNA
  modified_base 1: mod_base = OTHER; note = 2'- fluoro, 3'- thiophosphate
  modified_base 2: mod_base = OTHER; note = 2'-O- methyl, 3'- thiophosphate
  modified_base 3: mod_base = OTHER; note = 2'- fluoro
  modified_base 4: mod_base = OTHER; note = 2'-O- methyl
  modified_base 5: mod_base = OTHER; note = 2'- fluoro
  modified_base 6: mod_base = OTHER; note = 2'-O- methyl
  modified_base 7: mod_base = OTHER; note = 2'- fluoro
  modified_base 8: mod_base = OTHER; note = 2'-O- methyl
  modified_base 9: mod_base = OTHER; note = 2'- fluoro
  modified_base 10: mod_base = OTHER; note = 2'-O- methyl
  modified_base 11: mod_base = OTHER; note = 2'- fluoro
  modified_base 12: mod_base = OTHER; note = 2'-O- methyl
  modified_base 13: mod_base = OTHER; note = 2'- fluoro
  modified_base 14: mod_base = OTHER; note = 2'-O- methyl
  modified_base 15: mod_base = OTHER; note = 2'- fluoro
  modified_base 16: mod_base = OTHER; note = 2'-O- methyl
  modified_base 17: mod_base = OTHER; note = 2'- fluoro
  modified_base 18: mod_base = OTHER; note = 2'-O- methyl
  modified_base 19: mod_base = OTHER; note = 2'- fluoro
  modified_base 20: mod_base = OTHER; note = 2'-O- methyl
  modified_base 21: mod_base = OTHER; note = 2'- fluoro
cgcctgcctgctgctgatcca

SEQ ID NO: 231 - RNA, 21 nt, synthetic construct
  source 1..21: mol_type = other RNA
  modified_base 1: mod_base = OTHER; note = 2'- fluoro, 3'- thiophosphate
  modified_base 2: mod_base = OTHER; note = 2'-O- methyl, 3'- thiophosphate
  modified_base 3: mod_base = OTHER; note = 2'- fluoro
  modified_base 4: mod_base = OTHER; note = 2'-O- methyl
  modified_base 5: mod_base = OTHER; note = 2'- fluoro
  modified_base 6: mod_base = OTHER; note = 2'-O- methyl
  modified_base 7: mod_base = OTHER; note = 2'- fluoro
  modified_base 8: mod_base = OTHER; note = 2'-O- methyl
  modified_base 9: mod_base = OTHER; note = 2'- fluoro
  modified_base 10: mod_base = OTHER; note = 2'-O- methyl
  modified_base 11: mod_base = OTHER; note = 2'- fluoro
  modified_base 12: mod_base = OTHER; note = 2'-O- methyl
  modified_base 13: mod_base = OTHER; note = 2'- fluoro
  modified_base 14: mod_base = OTHER; note = 2'-O- methyl
  modified_base 15: mod_base = OTHER; note = 2'- fluoro
  modified_base 16: mod_base = OTHER; note = 2'-O- methyl
  modified_base 17: mod_base = OTHER; note = 2'- fluoro
  modified_base 18: mod_base = OTHER; note = 2'-O- methyl
  modified_base 19: mod_base = OTHER; note = 2'- fluoro
  modified_base 20: mod_base = OTHER; note = 2'-O- methyl
  modified_base 21: mod_base = OTHER; note = 2'- fluoro
tgcctgctgctgatccagcct

SEQ ID NO: 232 - RNA, 21 nt, synthetic construct
  source 1..21: mol_type = other RNA
  modified_base 1: mod_base = OTHER; note = 2'- fluoro, 3'- thiophosphate
  modified_base 2: mod_base = OTHER; note = 2'-O- methyl, 3'- thiophosphate
  modified_base 3: mod_base = OTHER; note = 2'- fluoro
  modified_base 4: mod_base = OTHER; note = 2'-O- methyl
  modified_base 5: mod_base = OTHER; note = 2'- fluoro
  modified_base 6: mod_base = OTHER; note = 2'-O- methyl
  modified_base 7: mod_base = OTHER; note = 2'- fluoro
  modified_base 8: mod_base = OTHER; note = 2'-O- methyl
  modified_base 9: mod_base = OTHER; note = 2'- fluoro
  modified_base 10: mod_base = OTHER; note = 2'-O- methyl
  modified_base 11: mod_base = OTHER; note = 2'- fluoro
  modified_base 12: mod_base = OTHER; note = 2'-O- methyl
  modified_base 13: mod_base = OTHER; note = 2'- fluoro
  modified_base 14: mod_base = OTHER; note = 2'-O- methyl
  modified_base 15: mod_base = OTHER; note = 2'- fluoro
  modified_base 16: mod_base = OTHER; note = 2'-O- methyl
  modified_base 17: mod_base = OTHER; note = 2'- fluoro
  modified_base 18: mod_base = OTHER; note = 2'-O- methyl
  modified_base 19: mod_base = OTHER; note = 2'- fluoro
  modified_base 20: mod_base = OTHER; note = 2'-O- methyl
  modified_base 21: mod_base = OTHER; note = 2'- fluoro
cctgctgctgatccagcctca

SEQ ID NO: 233 - RNA, 21 nt, synthetic construct
  source 1..21: mol_type = other RNA
  modified_base 1: mod_base = OTHER; note = 2'- fluoro, 3'- thiophosphate
  modified_base 2: mod_base = OTHER; note = 2'-O- methyl, 3'- thiophosphate
  modified_base 3: mod_base = OTHER; note = 2'- fluoro
  modified_base 4: mod_base = OTHER; note = 2'-O- methyl
  modified_base 5: mod_base = OTHER; note = 2'- fluoro
  modified_base 6: mod_base = OTHER; note = 2'-O- methyl
  modified_base 7: mod_base = OTHER; note = 2'- fluoro
  modified_base 8: mod_base = OTHER; note = 2'-O- methyl
  modified_base 9: mod_base = OTHER; note = 2'- fluoro
  modified_base 10: mod_base = OTHER; note = 2'-O- methyl
  modified_base 11: mod_base = OTHER; note = 2'- fluoro
  modified_base 12: mod_base = OTHER; note = 2'-O- methyl
  modified_base 13: mod_base = OTHER; note = 2'- fluoro
  modified_base 14: mod_base = OTHER; note = 2'-O- methyl
  modified_base 15: mod_base = OTHER; note = 2'- fluoro
  modified_base 16: mod_base = OTHER; note = 2'-O- methyl
  modified_base 17: mod_base = OTHER; note = 2'- fluoro
  modified_base 18: mod_base = OTHER; note = 2'-O- methyl
  modified_base 19: mod_base = OTHER; note = 2'- fluoro
  modified_base 20: mod_base = OTHER; note = 2'-O- methyl
  modified_base 21: mod_base = OTHER; note = 2'- fluoro
tgctgctgatccagcctcact

SEQ ID NO: 234 - RNA, 21 nt, synthetic construct
  source 1..21: mol_type = other RNA
  modified_base 1: mod_base = OTHER; note = 2'- fluoro, 3'- thiophosphate
  modified_base 2: mod_base = OTHER; note = 2'-O- methyl, 3'- thiophosphate
  modified_base 3: mod_base = OTHER; note = 2'- fluoro
  modified_base 4: mod_base = OTHER; note = 2'-O- methyl
  modified_base 5: mod_base = OTHER; note = 2'- fluoro
  modified_base 6: mod_base = OTHER; note = 2'-O- methyl
  modified_base 7: mod_base = OTHER; note = 2'- fluoro
  modified_base 8: mod_base = OTHER; note = 2'-O- methyl
  modified_base 9: mod_base = OTHER; note = 2'- fluoro
  modified_base 10: mod_base = OTHER; note = 2'-O- methyl
  modified_base 11: mod_base = OTHER; note = 2'- fluoro
  modified_base 12: mod_base = OTHER; note = 2'-O- methyl
  modified_base 13: mod_base = OTHER; note = 2'- fluoro
  modified_base 14: mod_base = OTHER; note = 2'-O- methyl
  modified_base 15: mod_base = OTHER; note = 2'- fluoro
  modified_base 16: mod_base = OTHER; note = 2'-O- methyl
  modified_base 17: mod_base = OTHER; note = 2'- fluoro
  modified_base 18: mod_base = OTHER; note = 2'-O- methyl
  modified_base 19: mod_base = OTHER; note = 2'- fluoro
  modified_base 20: mod_base = OTHER; note = 2'-O- methyl
  modified_base 21: mod_base = OTHER; note = 2'- fluoro
gctgctgatccagcctcacta

SEQ ID NO: 235 - RNA, 21 nt, synthetic construct
  source 1..21: mol_type = other RNA
  modified_base 1: mod_base = OTHER; note = 2'- fluoro, 3'- thiophosphate
  modified_base 2: mod_base = OTHER; note = 2'-O- methyl, 3'- thiophosphate
  modified_base 3: mod_base = OTHER; note = 2'- fluoro
  modified_base 4: mod_base = OTHER; note = 2'-O- methyl
  modified_base 5: mod_base = OTHER; note = 2'- fluoro
  modified_base 6: mod_base = OTHER; note = 2'-O- methyl
  modified_base 7: mod_base = OTHER; note = 2'- fluoro
  modified_base 8: mod_base = OTHER; note = 2'-O- methyl
  modified_base 9: mod_base = OTHER; note = 2'- fluoro
  modified_base 10: mod_base = OTHER; note = 2'-O- methyl
  modified_base 11: mod_base = OTHER; note = 2'- fluoro
  modified_base 12: mod_base = OTHER; note = 2'-O- methyl
  modified_base 13: mod_base = OTHER; note = 2'- fluoro
  modified_base 14: mod_base = OTHER; note = 2'-O- methyl
  modified_base 15: mod_base = OTHER; note = 2'- fluoro
  modified_base 16: mod_base = OTHER; note = 2'-O- methyl
  modified_base 17: mod_base = OTHER; note = 2'- fluoro
  modified_base 18: mod_base = OTHER; note = 2'-O- methyl
  modified_base 19: mod_base = OTHER; note = 2'- fluoro
  modified_base 20: mod_base = OTHER; note = 2'-O- methyl
  modified_base 21: mod_base = OTHER; note = 2'- fluoro
ctgctgatccagcctcactat

SEQ ID NO: 236 - RNA, 21 nt, synthetic construct
  source 1..21: mol_type = other RNA
  modified_base 1: mod_base = OTHER; note = 2'- fluoro, 3'- thiophosphate
  modified_base 2: mod_base = OTHER; note = 2'-O- methyl, 3'- thiophosphate
  modified_base 3: mod_base = OTHER; note = 2'- fluoro
  modified_base 4: mod_base = OTHER; note = 2'-O- methyl
  modified_base 5: mod_base = OTHER; note = 2'- fluoro
  modified_base 6: mod_base = OTHER; note = 2'-O- methyl
  modified_base 7: mod_base = OTHER; note = 2'- fluoro
  modified_base 8: mod_base = OTHER; note = 2'-O- methyl
  modified_base 9: mod_base = OTHER; note = 2'- fluoro
  modified_base 10: mod_base = OTHER; note = 2'-O- methyl
  modified_base 11: mod_base = OTHER; note = 2'- fluoro
  modified_base 12: mod_base = OTHER; note = 2'-O- methyl
  modified_base 13: mod_base = OTHER; note = 2'- fluoro
  modified_base 14: mod_base = OTHER; note = 2'-O- methyl
  modified_base 15: mod_base = OTHER; note = 2'- fluoro
  modified_base 16: mod_base = OTHER; note = 2'-O- methyl
  modified_base 17: mod_base = OTHER; note = 2'- fluoro
  modified_base 18: mod_base = OTHER; note = 2'-O- methyl
  modified_base 19: mod_base = OTHER; note = 2'- fluoro
  modified_base 20: mod_base = OTHER; note = 2'-O- methyl
  modified_base 21: mod_base = OTHER; note = 2'- fluoro
ccagcctcactatgcctctga

SEQ ID NO: 237 - RNA, 21 nt, synthetic construct
  source 1..21: mol_type = other RNA
  modified_base 1: mod_base = OTHER; note = 2'- fluoro, 3'- thiophosphate
  modified_base 2: mod_base = OTHER; note = 2'-O- methyl, 3'- thiophosphate
  modified_base 3: mod_base = OTHER; note = 2'- fluoro
  modified_base 4: mod_base = OTHER; note = 2'-O- methyl
  modified_base 5: mod_base = OTHER; note = 2'- fluoro
  modified_base 6: mod_base = OTHER; note = 2'-O- methyl
  modified_base 7: mod_base = OTHER; note = 2'- fluoro
  modified_base 8: mod_base = OTHER; note = 2'-O- methyl
  modified_base 9: mod_base = OTHER; note = 2'- fluoro
  modified_base 10: mod_base = OTHER; note = 2'-O- methyl
  modified_base 11: mod_base = OTHER; note = 2'- fluoro
  modified_base 12: mod_base = OTHER; note = 2'-O- methyl
  modified_base 13: mod_base = OTHER; note = 2'- fluoro
  modified_base 14: mod_base = OTHER; note = 2'-O- methyl
  modified_base 15: mod_base = OTHER; note = 2'- fluoro
  modified_base 16: mod_base = OTHER; note = 2'-O- methyl
  modified_base 17: mod_base = OTHER; note = 2'- fluoro
  modified_base 18: mod_base = OTHER; note = 2'-O- methyl
  modified_base 19: mod_base = OTHER; note = 2'- fluoro
  modified_base 20: mod_base = OTHER; note = 2'-O- methyl
  modified_base 21: mod_base = OTHER; note = 2'- fluoro
gcctcactatgcctctgacct

SEQ ID NO: 238 - RNA, 21 nt, synthetic construct
  source 1..21: mol_type = other RNA
  modified_base 1: mod_base = OTHER; note = 2'- fluoro, 3'- thiophosphate
  modified_base 2: mod_base = OTHER; note = 2'-O- methyl, 3'- thiophosphate
  modified_base 3: mod_base = OTHER; note = 2'- fluoro
  modified_base 4: mod_base = OTHER; note = 2'-O- methyl
  modified_base 5: mod_base = OTHER; note = 2'- fluoro
  modified_base 6: mod_base = OTHER; note = 2'-O- methyl
  modified_base 7: mod_base = OTHER; note = 2'- fluoro
  modified_base 8: mod_base = OTHER; note = 2'-O- methyl
  modified_base 9: mod_base = OTHER; note = 2'- fluoro
  modified_base 10: mod_base = OTHER; note = 2'-O- methyl
  modified_base 11: mod_base = OTHER; note = 2'- fluoro
  modified_base 12: mod_base = OTHER; note = 2'-O- methyl
  modified_base 13: mod_base = OTHER; note = 2'- fluoro
  modified_base 14: mod_base = OTHER; note = 2'-O- methyl
  modified_base 15: mod_base = OTHER; note = 2'- fluoro
  modified_base 16: mod_base = OTHER; note = 2'-O- methyl
  modified_base 17: mod_base = OTHER; note = 2'- fluoro
  modified_base 18: mod_base = OTHER; note = 2'-O- methyl
  modified_base 19: mod_base = OTHER; note = 2'- fluoro
  modified_base 20: mod_base = OTHER; note = 2'-O- methyl
  modified_base 21: mod_base = OTHER; note = 2'- fluoro
tcactatgcctctgacctgga

SEQ ID NO: 239 - RNA, 21 nt, synthetic construct
  source 1..21: mol_type = other RNA
  modified_base 1: mod_base = OTHER; note = 2'- fluoro, 3'- thiophosphate
  modified_base 2: mod_base = OTHER; note = 2'-O- methyl, 3'- thiophosphate
  modified_base 3: mod_base = OTHER; note = 2'- fluoro
  modified_base 4: mod_base = OTHER; note = 2'-O- methyl
  modified_base 5: mod_base = OTHER; note = 2'- fluoro
  modified_base 6: mod_base = OTHER; note = 2'-O- methyl
  modified_base 7: mod_base = OTHER; note = 2'- fluoro
  modified_base 8: mod_base = OTHER; note = 2'-O- methyl
  modified_base 9: mod_base = OTHER; note = 2'- fluoro
  modified_base 10: mod_base = OTHER; note = 2'-O- methyl
  modified_base 11: mod_base = OTHER; note = 2'- fluoro
  modified_base 12: mod_base = OTHER; note = 2'-O- methyl
  modified_base 13: mod_base = OTHER; note = 2'- fluoro
  modified_base 14: mod_base = OTHER; note = 2'-O- methyl
  modified_base 15: mod_base = OTHER; note = 2'- fluoro
  modified_base 16: mod_base = OTHER; note = 2'-O- methyl
  modified_base 17: mod_base = OTHER; note = 2'- fluoro
  modified_base 18: mod_base = OTHER; note = 2'-O- methyl
  modified_base 19: mod_base = OTHER; note = 2'- fluoro
  modified_base 20: mod_base = OTHER; note = 2'-O- methyl
  modified_base 21: mod_base = OTHER; note = 2'- fluoro
actatgcctctgacctggaca

SEQ ID NO: 240 - RNA, 21 nt, synthetic construct
  source 1..21: mol_type = other RNA
  modified_base 1: mod_base = OTHER; note = 2'- fluoro, 3'- thiophosphate
  modified_base 2: mod_base = OTHER; note = 2'-O- methyl, 3'- thiophosphate
  modified_base 3: mod_base = OTHER; note = 2'- fluoro
  modified_base 4: mod_base = OTHER; note = 2'-O- methyl
  modified_base 5: mod_base = OTHER; note = 2'- fluoro
  modified_base 6: mod_base = OTHER; note = 2'-O- methyl
  modified_base 7: mod_base = OTHER; note = 2'- fluoro
  modified_base 8: mod_base = OTHER; note = 2'-O- methyl
  modified_base 9: mod_base = OTHER; note = 2'- fluoro
  modified_base 10: mod_base = OTHER; note = 2'-O- methyl
  modified_base 11: mod_base = OTHER; note = 2'- fluoro
  modified_base 12: mod_base = OTHER; note = 2'-O- methyl
  modified_base 13: mod_base = OTHER; note = 2'- fluoro
  modified_base 14: mod_base = OTHER; note = 2'-O- methyl
  modified_base 15: mod_base = OTHER; note = 2'- fluoro
  modified_base 16: mod_base = OTHER; note = 2'-O- methyl
  modified_base 17: mod_base = OTHER; note = 2'- fluoro
  modified_base 18: mod_base = OTHER; note = 2'-O- methyl
  modified_base 19: mod_base = OTHER; note = 2'- fluoro
  modified_base 20: mod_base = OTHER; note = 2'-O- methyl
  modified_base 21: mod_base = OTHER; note = 2'- fluoro
ctatgcctctgacctggacaa

SEQ ID NO: 241 - RNA, 21 nt, synthetic construct
  source 1..21: mol_type = other RNA
  modified_base 1: mod_base = OTHER; note = 2'- fluoro, 3'- thiophosphate
  modified_base 2: mod_base = OTHER; note = 2'-O- methyl, 3'- thiophosphate
  modified_base 3: mod_base = OTHER; note = 2'- fluoro
  modified_base 4: mod_base = OTHER; note = 2'-O- methyl
  modified_base 5: mod_base = OTHER; note = 2'- fluoro
  modified_base 6: mod_base = OTHER; note = 2'-O- methyl
  modified_base 7: mod_base = OTHER; note = 2'- fluoro
  modified_base 8: mod_base = OTHER; note = 2'-O- methyl
  modified_base 9: mod_base = OTHER; note = 2'- fluoro
  modified_base 10: mod_base = OTHER; note = 2'-O- methyl
  modified_base 11: mod_base = OTHER; note = 2'- fluoro
  modified_base 12: mod_base = OTHER; note = 2'-O- methyl
  modified_base 13: mod_base = OTHER; note = 2'- fluoro
  modified_base 14: mod_base = OTHER; note = 2'-O- methyl
  modified_base 15: mod_base = OTHER; note = 2'- fluoro
  modified_base 16: mod_base = OTHER; note = 2'-O- methyl
  modified_base 17: mod_base = OTHER; note = 2'- fluoro
  modified_base 18: mod_base = OTHER; note = 2'-O- methyl
  modified_base 19: mod_base = OTHER; note = 2'- fluoro
  modified_base 20: mod_base = OTHER; note = 2'-O- methyl
  modified_base 21: mod_base = OTHER; note = 2'- fluoro
ctctgacctggacaaggtgga

SEQ ID NO: 242 - RNA, 21 nt, synthetic construct
  source 1..21: mol_type = other RNA
  modified_base 1: mod_base = OTHER; note = 2'- fluoro, 3'- thiophosphate
  modified_base 2: mod_base = OTHER; note = 2'-O- methyl, 3'- thiophosphate
  modified_base 3: mod_base = OTHER; note = 2'- fluoro
  modified_base 4: mod_base = OTHER; note = 2'-O- methyl
  modified_base 5: mod_base = OTHER; note = 2'- fluoro
  modified_base 6: mod_base = OTHER; note = 2'-O- methyl
  modified_base 7: mod_base = OTHER; note = 2'- fluoro
  modified_base 8: mod_base = OTHER; note = 2'-O- methyl
  modified_base 9: mod_base = OTHER; note = 2'- fluoro
  modified_base 10: mod_base = OTHER; note = 2'-O- methyl
  modified_base 11: mod_base = OTHER; note = 2'- fluoro
  modified_base 12: mod_base = OTHER; note = 2'-O- methyl
  modified_base 13: mod_base = OTHER; note = 2'- fluoro
  modified_base 14: mod_base = OTHER; note = 2'-O- methyl
  modified_base 15: mod_base = OTHER; note = 2'- fluoro
  modified_base 16: mod_base = OTHER; note = 2'-O- methyl
  modified_base 17: mod_base = OTHER; note = 2'- fluoro
  modified_base 18: mod_base = OTHER; note = 2'-O- methyl
  modified_base 19: mod_base = OTHER; note = 2'- fluoro
  modified_base 20: mod_base = OTHER; note = 2'-O- methyl
  modified_base 21: mod_base = OTHER; note = 2'- fluoro
gacctggacaaggtggagggt

SEQ ID NO: 243 - RNA, 21 nt, synthetic construct
  source 1..21: mol_type = other RNA
  modified_base 1: mod_base = OTHER; note = 2'- fluoro, 3'- thiophosphate
  modified_base 2: mod_base = OTHER; note = 2'-O- methyl, 3'- thiophosphate
  modified_base 3: mod_base = OTHER; note = 2'- fluoro
  modified_base 4: mod_base = OTHER; note = 2'-O- methyl
  modified_base 5: mod_base = OTHER; note = 2'- fluoro
  modified_base 6: mod_base = OTHER; note = 2'-O- methyl
  modified_base 7: mod_base = OTHER; note = 2'- fluoro
  modified_base 8: mod_base = OTHER; note = 2'-O- methyl
  modified_base 9: mod_base = OTHER; note = 2'- fluoro
  modified_base 10: mod_base = OTHER; note = 2'-O- methyl
  modified_base 11: mod_base = OTHER; note = 2'- fluoro
  modified_base 12: mod_base = OTHER; note = 2'-O- methyl
  modified_base 13: mod_base = OTHER; note = 2'- fluoro
  modified_base 14: mod_base = OTHER; note = 2'-O- methyl
  modified_base 15: mod_base = OTHER; note = 2'- fluoro
  modified_base 16: mod_base = OTHER; note = 2'-O- methyl
  modified_base 17: mod_base = OTHER; note = 2'- fluoro
  modified_base 18: mod_base = OTHER; note = 2'-O- methyl
  modified_base 19: mod_base = OTHER; note = 2'- fluoro
  modified_base 20: mod_base = OTHER; note = 2'-O- methyl
  modified_base 21: mod_base = OTHER; note = 2'- fluoro
tggacaaggtggagggtctca

SEQ ID NO: 244 - RNA, 20 nt, synthetic construct
  source 1..20: mol_type = other RNA
  modified_base 1: mod_base = OTHER; note = 2'-O- methyl, 3'- thiophosphate
  modified_base 2: mod_base = OTHER; note = 2'- fluoro, 3'- thiophosphate
  modified_base 3: mod_base = OTHER; note = 2'-O- methyl
  modified_base 4: mod_base = OTHER; note = 2'- fluoro
  modified_base 5: mod_base = OTHER; note = 2'-O- methyl
  modified_base 6: mod_base = OTHER; note = 2'- fluoro
  modified_base 7: mod_base = OTHER; note = 2'-O- methyl
  modified_base 8: mod_base = OTHER; note = 2'- fluoro
  modified_base 9: mod_base = OTHER; note = 2'-O- methyl
  modified_base 10: mod_base = OTHER; note = 2'- fluoro
  modified_base 11: mod_base = OTHER; note = 2'-O- methyl
  modified_base 12: mod_base = OTHER; note = 2'- fluoro
  modified_base 13: mod_base = OTHER; note = 2'-O- methyl
  modified_base 14: mod_base = OTHER; note = 2'- fluoro
  modified_base 15: mod_base = OTHER; note = 2'-O- methyl
  modified_base 16: mod_base = OTHER; note = 2'- fluoro
  modified_base 17: mod_base = OTHER; note = 2'-O- methyl
  modified_base 18: mod_base = OTHER; note = 2'- fluoro
  modified_base 19: mod_base = OTHER; note = 2'-O- methyl
  modified_base 20: mod_base = OTHER; note = 2'- fluoro
caaggtggagggtctcactt

SEQ ID NO: 245 - RNA, 21 nt, synthetic construct
  source 1..21: mol_type = other RNA
  modified_base 1: mod_base = OTHER; note = 2'- fluoro, 3'- thiophosphate
  modified_base 2: mod_base = OTHER; note = 2'-O- methyl, 3'- thiophosphate
  modified_base 3: mod_base = OTHER; note = 2'- fluoro
  modified_base 4: mod_base = OTHER; note = 2'-O- methyl
  modified_base 5: mod_base = OTHER; note = 2'- fluoro
  modified_base 6: mod_base = OTHER; note = 2'-O- methyl
  modified_base 7: mod_base = OTHER; note = 2'- fluoro
  modified_base 8: mod_base = OTHER; note = 2'-O- methyl
  modified_base 9: mod_base = OTHER; note = 2'- fluoro
  modified_base 10: mod_base = OTHER; note = 2'-O- methyl
  modified_base 11: mod_base = OTHER; note = 2'- fluoro
  modified_base 12: mod_base = OTHER; note = 2'-O- methyl
  modified_base 13: mod_base = OTHER; note = 2'- fluoro
  modified_base 14: mod_base = OTHER; note = 2'-O- methyl
  modified_base 15: mod_base = OTHER; note = 2'- fluoro
  modified_base 16: mod_base = OTHER; note = 2'-O- methyl
  modified_base 17: mod_base = OTHER; note = 2'- fluoro
  modified_base 18: mod_base = OTHER; note = 2'-O- methyl
  modified_base 19: mod_base = OTHER; note = 2'- fluoro
  modified_base 20: mod_base = OTHER; note = 2'-O- methyl
  modified_base 21: mod_base = OTHER; note = 2'- fluoro
ggagggtctcactttccagca

SEQ ID NO: 246 - RNA, 21 nt, synthetic construct
  source 1..21: mol_type = other RNA
  modified_base 1: mod_base = OTHER; note = 2'- fluoro, 3'- thiophosphate
  modified_base 2: mod_base = OTHER; note = 2'-O- methyl, 3'- thiophosphate
  modified_base 3: mod_base = OTHER; note = 2'- fluoro
  modified_base 4: mod_base = OTHER; note = 2'-O- methyl
  modified_base 5: mod_base = OTHER; note = 2'- fluoro
  modified_base 6: mod_base = OTHER; note = 2'-O- methyl
  modified_base 7: mod_base = OTHER; note = 2'- fluoro
  modified_base 8: mod_base = OTHER; note = 2'-O- methyl
  modified_base 9: mod_base = OTHER; note = 2'- fluoro
  modified_base 10: mod_base = OTHER; note = 2'-O- methyl
  modified_base 11: mod_base = OTHER; note = 2'- fluoro
  modified_base 12: mod_base = OTHER; note = 2'-O- methyl
  modified_base 13: mod_base = OTHER; note = 2'- fluoro
  modified_base 14: mod_base = OTHER; note = 2'-O- methyl
  modified_base 15: mod_base = OTHER; note = 2'- fluoro
  modified_base 16: mod_base = OTHER; note = 2'-O- methyl
  modified_base 17: mod_base = OTHER; note = 2'- fluoro
  modified_base 18: mod_base = OTHER; note = 2'-O- methyl
  modified_base 19: mod_base = OTHER; note = 2'- fluoro
  modified_base 20: mod_base = OTHER; note = 2'-O- methyl
  modified_base 21: mod_base = OTHER; note = 2'- fluoro
cagggtgggggaggtgctgaa

SEQ ID NO: 247 - RNA, 21 nt, synthetic construct
  source 1..21: mol_type = other RNA
  modified_base 1: mod_base = OTHER; note = 2'- fluoro, 3'- thiophosphate
  modified_base 2: mod_base = OTHER; note = 2'-O- methyl, 3'- thiophosphate
  modified_base 3: mod_base = OTHER; note = 2'- fluoro
  modified_base 4: mod_base = OTHER; note = 2'-O- methyl
  modified_base 5: mod_base = OTHER; note = 2'- fluoro
  modified_base 6: mod_base = OTHER; note = 2'-O- methyl
  modified_base 7: mod_base = OTHER; note = 2'- fluoro
  modified_base 8: mod_base = OTHER; note = 2'-O- methyl
  modified_base 9: mod_base = OTHER; note = 2'- fluoro
  modified_base 10: mod_base = OTHER; note = 2'-O- methyl
  modified_base 11: mod_base = OTHER; note = 2'- fluoro
  modified_base 12: mod_base = OTHER; note = 2'-O- methyl
  modified_base 13: mod_base = OTHER; note = 2'- fluoro
  modified_base 14: mod_base = OTHER; note = 2'-O- methyl
  modified_base 15: mod_base = OTHER; note = 2'- fluoro
  modified_base 16: mod_base = OTHER; note = 2'-O- methyl
  modified_base 17: mod_base = OTHER; note = 2'- fluoro
  modified_base 18: mod_base = OTHER; note = 2'-O- methyl
  modified_base 19: mod_base = OTHER; note = 2'- fluoro
  modified_base 20: mod_base = OTHER; note = 2'-O- methyl
  modified_base 21: mod_base = OTHER; note = 2'- fluoro
gggtgggggaggtgctgaaca

SEQ ID NO: 248 - RNA, 21 nt, synthetic construct
  source 1..21: mol_type = other RNA
  modified_base 1: mod_base = OTHER; note = 2'- fluoro, 3'- thiophosphate
  modified_base 2: mod_base = OTHER; note = 2'-O- methyl, 3'- thiophosphate
  modified_base 3: mod_base = OTHER; note = 2'- fluoro
  modified_base 4: mod_base = OTHER; note = 2'-O- methyl
  modified_base 5: mod_base = OTHER; note = 2'- fluoro
  modified_base 6: mod_base = OTHER; note = 2'-O- methyl
  modified_base 7: mod_base = OTHER; note = 2'- fluoro
  modified_base 8: mod_base = OTHER; note = 2'-O- methyl
  modified_base 9: mod_base = OTHER; note = 2'- fluoro
  modified_base 10: mod_base = OTHER; note = 2'-O- methyl
  modified_base 11: mod_base = OTHER; note = 2'- fluoro
  modified_base 12: mod_base = OTHER; note = 2'-O- methyl
  modified_base 13: mod_base = OTHER; note = 2'- fluoro
  modified_base 14: mod_base = OTHER; note = 2'-O- methyl
  modified_base 15: mod_base = OTHER; note = 2'- fluoro
  modified_base 16: mod_base = OTHER; note = 2'-O- methyl
  modified_base 17: mod_base = OTHER; note = 2'- fluoro
  modified_base 18: mod_base = OTHER; note = 2'-O- methyl
  modified_base 19: mod_base = OTHER; note = 2'- fluoro
  modified_base 20: mod_base = OTHER; note = 2'-O- methyl
  modified_base 21: mod_base = OTHER; note = 2'- fluoro
tgggggaggtgctgaacagca

SEQ ID NO: 249 - RNA, 21 nt, synthetic construct
  source 1..21: mol_type = other RNA
  modified_base 1: mod_base = OTHER; note = 2'- fluoro, 3'- thiophosphate
  modified_base 2: mod_base = OTHER; note = 2'-O- methyl, 3'- thiophosphate
  modified_base 3: mod_base = OTHER; note = 2'- fluoro
  modified_base 4: mod_base = OTHER; note = 2'-O- methyl
  modified_base 5: mod_base = OTHER; note = 2'- fluoro
  modified_base 6: mod_base = OTHER; note = 2'-O- methyl
  modified_base 7: mod_base = OTHER; note = 2'- fluoro
  modified_base 8: mod_base = OTHER; note = 2'-O- methyl
  modified_base 9: mod_base = OTHER; note = 2'- fluoro
  modified_base 10: mod_base = OTHER; note = 2'-O- methyl
  modified_base 11: mod_base = OTHER; note = 2'- fluoro
  modified_base 12: mod_base = OTHER; note = 2'-O- methyl
  modified_base 13: mod_base = OTHER; note = 2'- fluoro
  modified_base 14: mod_base = OTHER; note = 2'-O- methyl
  modified_base 15: mod_base = OTHER; note = 2'- fluoro
  modified_base 16: mod_base = OTHER; note = 2'-O- methyl
  modified_base 17: mod_base = OTHER; note = 2'- fluoro
  modified_base 18: mod_base = OTHER; note = 2'-O- methyl
  modified_base 19: mod_base = OTHER; note = 2'- fluoro
  modified_base 20: mod_base = OTHER; note = 2'-O- methyl
  modified_base 21: mod_base = OTHER; note = 2'- fluoro
gggggaggtgctgaacagcat

SEQ ID NO: 250 - RNA, 21 nt, synthetic construct
  source 1..21: mol_type = other RNA
  modified_base 1: mod_base = OTHER; note = 2'- fluoro, 3'- thiophosphate
  modified_base 2: mod_base = OTHER; note = 2'-O- methyl, 3'- thiophosphate
  modified_base 3: mod_base = OTHER; note = 2'- fluoro
  modified_base 4: mod_base = OTHER; note = 2'-O- methyl
  modified_base 5: mod_base = OTHER; note = 2'- fluoro
  modified_base 6: mod_base = OTHER; note = 2'-O- methyl
  modified_base 7: mod_base = OTHER; note = 2'- fluoro
  modified_base 8: mod_base = OTHER; note = 2'-O- methyl
  modified_base 9: mod_base = OTHER; note = 2'- fluoro
  modified_base 10: mod_base = OTHER; note = 2'-O- methyl
  modified_base 11: mod_base = OTHER; note = 2'- fluoro
  modified_base 12: mod_base = OTHER; note = 2'-O- methyl
  modified_base 13: mod_base = OTHER; note = 2'- fluoro
  modified_base 14: mod_base = OTHER; note = 2'-O- methyl
  modified_base 15: mod_base = OTHER; note = 2'- fluoro
  modified_base 16: mod_base = OTHER; note = 2'-O- methyl
  modified_base 17: mod_base = OTHER; note = 2'- fluoro
  modified_base 18: mod_base = OTHER; note = 2'-O- methyl
  modified_base 19: mod_base = OTHER; note = 2'- fluoro
  modified_base 20: mod_base = OTHER; note = 2'-O- methyl
  modified_base 21: mod_base = OTHER; note = 2'- fluoro
ggggaggtgctgaacagcatt

SEQ ID NO: 251 - RNA, 21 nt, synthetic construct
  source 1..21: mol_type = other RNA
  modified_base 1: mod_base = OTHER; note = 2'- fluoro, 3'- thiophosphate
  modified_base 2: mod_base = OTHER; note = 2'-O- methyl, 3'- thiophosphate
  modified_base 3: mod_base = OTHER; note = 2'- fluoro
  modified_base 4: mod_base = OTHER; note = 2'-O- methyl
  modified_base 5: mod_base = OTHER; note = 2'- fluoro
  modified_base 6: mod_base = OTHER; note = 2'-O- methyl
  modified_base 7: mod_base = OTHER; note = 2'- fluoro
  modified_base 8: mod_base = OTHER; note = 2'-O- methyl
  modified_base 9: mod_base = OTHER; note = 2'- fluoro
  modified_base 10: mod_base = OTHER; note = 2'-O- methyl
  modified_base 11: mod_base = OTHER; note = 2'- fluoro
  modified_base 12: mod_base = OTHER; note = 2'-O- methyl
  modified_base 13: mod_base = OTHER; note = 2'- fluoro
  modified_base 14: mod_base = OTHER; note = 2'-O- methyl
  modified_base 15: mod_base = OTHER; note = 2'- fluoro
  modified_base 16: mod_base = OTHER; note = 2'-O- methyl
  modified_base 17: mod_base = OTHER; note = 2'- fluoro
  modified_base 18: mod_base = OTHER; note = 2'-O- methyl
  modified_base 19: mod_base = OTHER; note = 2'- fluoro
  modified_base 20: mod_base = OTHER; note = 2'-O- methyl
  modified_base 21: mod_base = OTHER; note = 2'- fluoro
gggaggtgctgaacagcattt

SEQ ID NO: 252 - RNA, 21 nt, synthetic construct
  source 1..21: mol_type = other RNA
  modified_base 1: mod_base = OTHER; note = 2'- fluoro, 3'- thiophosphate
  modified_base 2: mod_base = OTHER; note = 2'-O- methyl, 3'- thiophosphate
  modified_base 3: mod_base = OTHER; note = 2'- fluoro
  modified_base 4: mod_base = OTHER; note = 2'-O- methyl
  modified_base 5: mod_base = OTHER; note = 2'- fluoro
  modified_base 6: mod_base = OTHER; note = 2'-O- methyl
  modified_base 7: mod_base = OTHER; note = 2'- fluoro
  modified_base 8: mod_base = OTHER; note = 2'-O- methyl
  modified_base 9: mod_base = OTHER; note = 2'- fluoro
  modified_base 10: mod_base = OTHER; note = 2'-O- methyl
  modified_base 11: mod_base = OTHER; note = 2'- fluoro
  modified_base 12: mod_base = OTHER; note = 2'-O- methyl
  modified_base 13: mod_base = OTHER; note = 2'- fluoro
  modified_base 14: mod_base = OTHER; note = 2'-O- methyl
  modified_base 15: mod_base = OTHER; note = 2'- fluoro
  modified_base 16: mod_base = OTHER; note = 2'-O- methyl
  modified_base 17: mod_base = OTHER; note = 2'- fluoro
  modified_base 18: mod_base = OTHER; note = 2'-O- methyl
  modified_base 19: mod_base = OTHER; note = 2'- fluoro
  modified_base 20: mod_base = OTHER; note = 2'-O- methyl
  modified_base 21: mod_base = OTHER; note = 2'- fluoro
aacagcattttttttgagctt

SEQ ID NO: 253 - RNA, 21 nt, synthetic construct
  source 1..21: mol_type = other RNA
  modified_base 1: mod_base = OTHER; note = 2'- fluoro, 3'- thiophosphate
  modified_base 2: mod_base = OTHER; note = 2'-O- methyl, 3'- thiophosphate
  modified_base 3: mod_base = OTHER; note = 2'- fluoro
  modified_base 4: mod_base = OTHER; note = 2'-O- methyl
  modified_base 5: mod_base = OTHER; note = 2'- fluoro
  modified_base 6: mod_base = OTHER; note = 2'-O- methyl
  modified_base 7: mod_base = OTHER; note = 2'- fluoro
  modified_base 8: mod_base = OTHER; note = 2'-O- methyl
  modified_base 9: mod_base = OTHER; note = 2'- fluoro
  modified_base 10: mod_base = OTHER; note = 2'-O- methyl
  modified_base 11: mod_base = OTHER; note = 2'- fluoro
  modified_base 12: mod_base = OTHER; note = 2'-O- methyl
  modified_base 13: mod_base = OTHER; note = 2'- fluoro
  modified_base 14: mod_base = OTHER; note = 2'-O- methyl
  modified_base 15: mod_base = OTHER; note = 2'- fluoro
  modified_base 16: mod_base = OTHER; note = 2'-O- methyl
  modified_base 17: mod_base = OTHER; note = 2'- fluoro
  modified_base 18: mod_base = OTHER; note = 2'-O- methyl
  modified_base 19: mod_base = OTHER; note = 2'- fluoro
  modified_base 20: mod_base = OTHER; note = 2'-O- methyl
  modified_base 21: mod_base = OTHER; note = 2'- fluoro
cagcattttttttgagcttga

SEQ ID NO: 254 - RNA, 21 nt, synthetic construct
  source 1..21: mol_type = other RNA
  modified_base 1: mod_base = OTHER; note = 2'- fluoro, 3'- thiophosphate
  modified_base 2: mod_base = OTHER; note = 2'-O- methyl, 3'- thiophosphate
  modified_base 3: mod_base = OTHER; note = 2'- fluoro
  modified_base 4: mod_base = OTHER; note = 2'-O- methyl
  modified_base 5: mod_base = OTHER; note = 2'- fluoro
  modified_base 6: mod_base = OTHER; note = 2'-O- methyl
  modified_base 7: mod_base = OTHER; note = 2'- fluoro
  modified_base 8: mod_base = OTHER; note = 2'-O- methyl
  modified_base 9: mod_base = OTHER; note = 2'- fluoro
  modified_base 10: mod_base = OTHER; note = 2'-O- methyl
  modified_base 11: mod_base = OTHER; note = 2'- fluoro
  modified_base 12: mod_base = OTHER; note = 2'-O- methyl
  modified_base 13: mod_base = OTHER; note = 2'- fluoro
  modified_base 14: mod_base = OTHER; note = 2'-O- methyl
  modified_base 15: mod_base = OTHER; note = 2'- fluoro
  modified_base 16: mod_base = OTHER; note = 2'-O- methyl
  modified_base 17: mod_base = OTHER; note = 2'- fluoro
  modified_base 18: mod_base = OTHER; note = 2'-O- methyl
  modified_base 19: mod_base = OTHER; note = 2'- fluoro
  modified_base 20: mod_base = OTHER; note = 2'-O- methyl
  modified_base 21: mod_base = OTHER; note = 2'- fluoro
agcattttttttgagcttgaa

SEQ ID NO: 255 - RNA, 21 nt, synthetic construct
  source 1..21: mol_type = other RNA
  modified_base 1: mod_base = OTHER; note = 2'- fluoro, 3'- thiophosphate
  modified_base 2: mod_base = OTHER; note = 2'-O- methyl, 3'- thiophosphate
  modified_base 3: mod_base = OTHER; note = 2'- fluoro
  modified_base 4: mod_base = OTHER; note = 2'-O- methyl
  modified_base 5: mod_base = OTHER; note = 2'- fluoro
  modified_base 6: mod_base = OTHER; note = 2'-O- methyl
  modified_base 7: mod_base = OTHER; note = 2'- fluoro
  modified_base 8: mod_base = OTHER; note = 2'-O- methyl
  modified_base 9: mod_base = OTHER; note = 2'- fluoro
  modified_base 10: mod_base = OTHER; note = 2'-O- methyl
  modified_base 11: mod_base = OTHER; note = 2'- fluoro
  modified_base 12: mod_base = OTHER; note = 2'-O- methyl
  modified_base 13: mod_base = OTHER; note = 2'- fluoro
  modified_base 14: mod_base = OTHER; note = 2'-O- methyl
  modified_base 15: mod_base = OTHER; note = 2'- fluoro
  modified_base 16: mod_base = OTHER; note = 2'-O- methyl
  modified_base 17: mod_base = OTHER; note = 2'- fluoro
  modified_base 18: mod_base = OTHER; note = 2'-O- methyl
  modified_base 19: mod_base = OTHER; note = 2'- fluoro
  modified_base 20: mod_base = OTHER; note = 2'-O- methyl
  modified_base 21: mod_base = OTHER; note = 2'- fluoro
ggtgaccctgaaccgcccatt

SEQ ID NO: 256 - RNA, 21 nt, synthetic construct
  source 1..21: mol_type = other RNA
  modified_base 1: mod_base = OTHER; note = 2'- fluoro, 3'- thiophosphate
  modified_base 2: mod_base = OTHER; note = 2'-O- methyl, 3'- thiophosphate
  modified_base 3: mod_base = OTHER; note = 2'- fluoro
  modified_base 4: mod_base = OTHER; note = 2'-O- methyl
  modified_base 5: mod_base = OTHER; note = 2'- fluoro
  modified_base 6: mod_base = OTHER; note = 2'-O- methyl
  modified_base 7: mod_base = OTHER; note = 2'- fluoro
  modified_base 8: mod_base = OTHER; note = 2'-O- methyl
  modified_base 9: mod_base = OTHER; note = 2'- fluoro
  modified_base 10: mod_base = OTHER; note = 2'-O- methyl
  modified_base 11: mod_base = OTHER; note = 2'- fluoro
  modified_base 12: mod_base = OTHER; note = 2'-O- methyl
  modified_base 13: mod_base = OTHER; note = 2'- fluoro
  modified_base 14: mod_base = OTHER; note = 2'-O- methyl
  modified_base 15: mod_base = OTHER; note = 2'- fluoro
  modified_base 16: mod_base = OTHER; note = 2'-O- methyl
  modified_base 17: mod_base = OTHER; note = 2'- fluoro
  modified_base 18: mod_base = OTHER; note = 2'-O- methyl
  modified_base 19: mod_base = OTHER; note = 2'- fluoro
  modified_base 20: mod_base = OTHER; note = 2'-O- methyl
  modified_base 21: mod_base = OTHER; note = 2'- fluoro
gaccctgaaccgcccattcct

SEQ ID NO: 257 - RNA, 21 nt, synthetic construct
  source 1..21: mol_type = other RNA
  modified_base 1: mod_base = OTHER; note = 2'- fluoro, 3'- thiophosphate
  modified_base 2: mod_base = OTHER; note = 2'-O- methyl, 3'- thiophosphate
  modified_base 3: mod_base = OTHER; note = 2'- fluoro
  modified_base 4: mod_base = OTHER; note = 2'-O- methyl
  modified_base 5: mod_base = OTHER; note = 2'- fluoro
  modified_base 6: mod_base = OTHER; note = 2'-O- methyl
  modified_base 7: mod_base = OTHER; note = 2'- fluoro
  modified_base 8: mod_base = OTHER; note = 2'-O- methyl
  modified_base 9: mod_base = OTHER; note = 2'- fluoro
  modified_base 10: mod_base = OTHER; note = 2'-O- methyl
  modified_base 11: mod_base = OTHER; note = 2'- fluoro
  modified_base 12: mod_base = OTHER; note = 2'-O- methyl
  modified_base 13: mod_base = OTHER; note = 2'- fluoro
  modified_base 14: mod_base = OTHER; note = 2'-O- methyl
  modified_base 15: mod_base = OTHER; note = 2'- fluoro
  modified_base 16: mod_base = OTHER; note = 2'-O- methyl
  modified_base 17: mod_base = OTHER; note = 2'- fluoro
  modified_base 18: mod_base = OTHER; note = 2'-O- methyl
  modified_base 19: mod_base = OTHER; note = 2'- fluoro
  modified_base 20: mod_base = OTHER; note = 2'-O- methyl
  modified_base 21: mod_base = OTHER; note = 2'- fluoro
ccctgaaccgcccattcctgt

SEQ ID NO: 258 - RNA, 21 nt, synthetic construct
  source 1..21: mol_type = other RNA
  modified_base 1: mod_base = OTHER; note = 2'- fluoro, 3'- thiophosphate
  modified_base 2: mod_base = OTHER; note = 2'-O- methyl, 3'- thiophosphate
  modified_base 3: mod_base = OTHER; note = 2'- fluoro
  modified_base 4: mod_base = OTHER; note = 2'-O- methyl
  modified_base 5: mod_base = OTHER; note = 2'- fluoro
  modified_base 6: mod_base = OTHER; note = 2'-O- methyl
  modified_base 7: mod_base = OTHER; note = 2'- fluoro
  modified_base 8: mod_base = OTHER; note = 2'-O- methyl
  modified_base 9: mod_base = OTHER; note = 2'- fluoro
  modified_base 10: mod_base = OTHER; note = 2'-O- methyl
  modified_base 11: mod_base = OTHER; note = 2'- fluoro
  modified_base 12: mod_base = OTHER; note = 2'-O- methyl
  modified_base 13: mod_base = OTHER; note = 2'- fluoro
  modified_base 14: mod_base = OTHER; note = 2'-O- methyl
  modified_base 15: mod_base = OTHER; note = 2'- fluoro
  modified_base 16: mod_base = OTHER; note = 2'-O- methyl
  modified_base 17: mod_base = OTHER; note = 2'- fluoro
  modified_base 18: mod_base = OTHER; note = 2'-O- methyl
  modified_base 19: mod_base = OTHER; note = 2'- fluoro
  modified_base 20: mod_base = OTHER; note = 2'-O- methyl
  modified_base 21: mod_base = OTHER; note = 2'- fluoro
ctgaaccgcccattcctgttt

SEQ ID NO: 259 - RNA, 21 nt, synthetic construct
  source 1..21: mol_type = other RNA
  modified_base 1: mod_base = OTHER; note = 2'- fluoro, 3'- thiophosphate
  modified_base 2: mod_base = OTHER; note = 2'-O- methyl, 3'- thiophosphate
  modified_base 3: mod_base = OTHER; note = 2'- fluoro
  modified_base 4: mod_base = OTHER; note = 2'-O- methyl
  modified_base 5: mod_base = OTHER; note = 2'- fluoro
  modified_base 6: mod_base = OTHER; note = 2'-O- methyl
  modified_base 7: mod_base = OTHER; note = 2'- fluoro
  modified_base 8: mod_base = OTHER; note = 2'-O- methyl
  modified_base 9: mod_base = OTHER; note = 2'- fluoro
  modified_base 10: mod_base = OTHER; note = 2'-O- methyl
  modified_base 11: mod_base = OTHER; note = 2'- fluoro
  modified_base 12: mod_base = OTHER; note = 2'-O- methyl
  modified_base 13: mod_base = OTHER; note = 2'- fluoro
  modified_base 14: mod_base = OTHER; note = 2'-O- methyl
  modified_base 15: mod_base = OTHER; note = 2'- fluoro
  modified_base 16: mod_base = OTHER; note = 2'-O- methyl
  modified_base 17: mod_base = OTHER; note = 2'- fluoro
  modified_base 18: mod_base = OTHER; note = 2'-O- methyl
  modified_base 19: mod_base = OTHER; note = 2'- fluoro
  modified_base 20: mod_base = OTHER; note = 2'-O- methyl
  modified_base 21: mod_base = OTHER; note = 2'- fluoro
gtgtatgatcaaagcgccact

SEQ ID NO: 260 - RNA, 21 nt, synthetic construct
  source 1..21: mol_type = other RNA
  modified_base 1: mod_base = OTHER; note = 2'- fluoro, 3'- thiophosphate
  modified_base 2: mod_base = OTHER; note = 2'-O- methyl, 3'- thiophosphate
  modified_base 3: mod_base = OTHER; note = 2'- fluoro
  modified_base 4: mod_base = OTHER; note = 2'-O- methyl
  modified_base 5: mod_base = OTHER; note = 2'- fluoro
  modified_base 6: mod_base = OTHER; note = 2'-O- methyl
  modified_base 7: mod_base = OTHER; note = 2'- fluoro
  modified_base 8: mod_base = OTHER; note = 2'-O- methyl
  modified_base 9: mod_base = OTHER; note = 2'- fluoro
  modified_base 10: mod_base = OTHER; note = 2'-O- methyl
  modified_base 11: mod_base = OTHER; note = 2'- fluoro
  modified_base 12: mod_base = OTHER; note = 2'-O- methyl
  modified_base 13: mod_base = OTHER; note = 2'- fluoro
  modified_base 14: mod_base = OTHER; note = 2'-O- methyl
  modified_base 15: mod_base = OTHER; note = 2'- fluoro
  modified_base 16: mod_base = OTHER; note = 2'-O- methyl
  modified_base 17: mod_base = OTHER; note = 2'- fluoro
  modified_base 18: mod_base = OTHER; note = 2'-O- methyl
  modified_base 19: mod_base = OTHER; note = 2'- fluoro
  modified_base 20: mod_base = OTHER; note = 2'-O- methyl
  modified_base 21: mod_base = OTHER; note = 2'- fluoro
tcaaagcgccactgccctgca

SEQ ID NO: 261 - RNA, 21 nt, synthetic construct
  source 1..21: mol_type = other RNA
  modified_base 1: mod_base = OTHER; note = 2'- fluoro, 3'- thiophosphate
  modified_base 2: mod_base = OTHER; note = 2'-O- methyl, 3'- thiophosphate
  modified_base 3: mod_base = OTHER; note = 2'- fluoro
  modified_base 4: mod_base = OTHER; note = 2'-O- methyl
  modified_base 5: mod_base = OTHER; note = 2'- fluoro
  modified_base 6: mod_base = OTHER; note = 2'-O- methyl
  modified_base 7: mod_base = OTHER; note = 2'- fluoro
  modified_base 8: mod_base = OTHER; note = 2'-O- methyl
  modified_base 9: mod_base = OTHER; note = 2'- fluoro
  modified_base 10: mod_base = OTHER; note = 2'-O- methyl
  modified_base 11: mod_base = OTHER; note = 2'- fluoro
  modified_base 12: mod_base = OTHER; note = 2'-O- methyl
  modified_base 13: mod_base = OTHER; note = 2'- fluoro
  modified_base 14: mod_base = OTHER; note = 2'-O- methyl
  modified_base 15: mod_base = OTHER; note = 2'- fluoro
  modified_base 16: mod_base = OTHER; note = 2'-O- methyl
  modified_base 17: mod_base = OTHER; note = 2'- fluoro
  modified_base 18: mod_base = OTHER; note = 2'-O- methyl
  modified_base 19: mod_base = OTHER; note = 2'- fluoro
  modified_base 20: mod_base = OTHER; note = 2'-O- methyl
  modified_base 21: mod_base = OTHER; note = 2'- fluoro
aagcgccactgccctgcactt

SEQ ID NO: 262 - RNA, 21 nt, synthetic construct
  source 1..21: mol_type = other RNA
  modified_base 1: mod_base = OTHER; note = 2'- fluoro, 3'- thiophosphate
  modified_base 2: mod_base = OTHER; note = 2'-O- methyl, 3'- thiophosphate
  modified_base 3: mod_base = OTHER; note = 2'- fluoro
  modified_base 4: mod_base = OTHER; note = 2'-O- methyl
  modified_base 5: mod_base = OTHER; note = 2'- fluoro
  modified_base 6: mod_base = OTHER; note = 2'-O- methyl
  modified_base 7: mod_base = OTHER; note = 2'- fluoro
  modified_base 8: mod_base = OTHER; note = 2'-O- methyl
  modified_base 9: mod_base = OTHER; note = 2'- fluoro
  modified_base 10: mod_base = OTHER; note = 2'-O- methyl
  modified_base 11: mod_base = OTHER; note = 2'- fluoro
  modified_base 12: mod_base = OTHER; note = 2'-O- methyl
  modified_base 13: mod_base = OTHER; note = 2'- fluoro
  modified_base 14: mod_base = OTHER; note = 2'-O- methyl
  modified_base 15: mod_base = OTHER; note = 2'- fluoro
  modified_base 16: mod_base = OTHER; note = 2'-O- methyl
  modified_base 17: mod_base = OTHER; note = 2'- fluoro
  modified_base 18: mod_base = OTHER; note = 2'-O- methyl
  modified_base 19: mod_base = OTHER; note = 2'- fluoro
  modified_base 20: mod_base = OTHER; note = 2'-O- methyl
  modified_base 21: mod_base = OTHER; note = 2'- fluoro
cgccactgccctgcacttcct

SEQ ID NO: 263 - RNA, 21 nt, synthetic construct
  source 1..21: mol_type = other RNA
  modified_base 1: mod_base = OTHER; note = 2'- fluoro, 3'- thiophosphate
  modified_base 2: mod_base = OTHER; note = 2'-O- methyl, 3'- thiophosphate
  modified_base 3: mod_base = OTHER; note = 2'- fluoro
  modified_base 4: mod_base = OTHER; note = 2'-O- methyl
  modified_base 5: mod_base = OTHER; note = 2'- fluoro
  modified_base 6: mod_base = OTHER; note = 2'-O- methyl
  modified_base 7: mod_base = OTHER; note = 2'- fluoro
  modified_base 8: mod_base = OTHER; note = 2'-O- methyl
  modified_base 9: mod_base = OTHER; note = 2'- fluoro
  modified_base 10: mod_base = OTHER; note = 2'-O- methyl
  modified_base 11: mod_base = OTHER; note = 2'- fluoro
  modified_base 12: mod_base = OTHER; note = 2'-O- methyl
  modified_base 13: mod_base = OTHER; note = 2'- fluoro
  modified_base 14: mod_base = OTHER; note = 2'-O- methyl
  modified_base 15: mod_base = OTHER; note = 2'- fluoro
  modified_base 16: mod_base = OTHER; note = 2'-O- methyl
  modified_base 17: mod_base = OTHER; note = 2'- fluoro
  modified_base 18: mod_base = OTHER; note = 2'-O- methyl
  modified_base 19: mod_base = OTHER; note = 2'- fluoro
  modified_base 20: mod_base = OTHER; note = 2'-O- methyl
  modified_base 21: mod_base = OTHER; note = 2'- fluoro
gcgatgtgtcacccccagtct

SEQ ID NO: 264 - RNA, 21 nt, synthetic construct
  source 1..21: mol_type = other RNA
  modified_base 1: mod_base = OTHER; note = 2'- fluoro, 3'- thiophosphate
  modified_base 2: mod_base = OTHER; note = 2'-O- methyl, 3'- thiophosphate
  modified_base 3: mod_base = OTHER; note = 2'- fluoro
  modified_base 4: mod_base = OTHER; note = 2'-O- methyl
  modified_base 5: mod_base = OTHER; note = 2'- fluoro
  modified_base 6: mod_base = OTHER; note = 2'-O- methyl
  modified_base 7: mod_base = OTHER; note = 2'- fluoro
  modified_base 8: mod_base = OTHER; note = 2'-O- methyl
  modified_base 9: mod_base = OTHER; note = 2'- fluoro
  modified_base 10: mod_base = OTHER; note = 2'-O- methyl
  modified_base 11: mod_base = OTHER; note = 2'- fluoro
  modified_base 12: mod_base = OTHER; note = 2'-O- methyl
  modified_base 13: mod_base = OTHER; note = 2'- fluoro
  modified_base 14: mod_base = OTHER; note = 2'-O- methyl
  modified_base 15: mod_base = OTHER; note = 2'- fluoro
  modified_base 16: mod_base = OTHER; note = 2'-O- methyl
  modified_base 17: mod_base = OTHER; note = 2'- fluoro
  modified_base 18: mod_base = OTHER; note = 2'-O- methyl
  modified_base 19: mod_base = OTHER; note = 2'- fluoro
  modified_base 20: mod_base = OTHER; note = 2'-O- methyl
  modified_base 21: mod_base = OTHER; note = 2'- fluoro
tgtgtcacccccagtctccca

SEQ ID NO: 265 - RNA, 21 nt, synthetic construct
  source 1..21: mol_type = other RNA
  modified_base 1: mod_base = OTHER; note = 2'- fluoro, 3'- thiophosphate
  modified_base 2: mod_base = OTHER; note = 2'-O- methyl, 3'- thiophosphate
  modified_base 3: mod_base = OTHER; note = 2'- fluoro
  modified_base 4: mod_base = OTHER; note = 2'-O- methyl
  modified_base 5: mod_base = OTHER; note = 2'- fluoro
  modified_base 6: mod_base = OTHER; note = 2'-O- methyl
  modified_base 7: mod_base = OTHER; note = 2'- fluoro
  modified_base 8: mod_base = OTHER; note = 2'-O- methyl
  modified_base 9: mod_base = OTHER; note = 2'- fluoro
  modified_base 10: mod_base = OTHER; note = 2'-O- methyl
  modified_base 11: mod_base = OTHER; note = 2'- fluoro
  modified_base 12: mod_base = OTHER; note = 2'-O- methyl
  modified_base 13: mod_base = OTHER; note = 2'- fluoro
  modified_base 14: mod_base = OTHER; note = 2'-O- methyl
  modified_base 15: mod_base = OTHER; note = 2'- fluoro
  modified_base 16: mod_base = OTHER; note = 2'-O- methyl
  modified_base 17: mod_base = OTHER; note = 2'- fluoro
  modified_base 18: mod_base = OTHER; note = 2'-O- methyl
  modified_base 19: mod_base = OTHER; note = 2'- fluoro
  modified_base 20: mod_base = OTHER; note = 2'-O- methyl
  modified_base 21: mod_base = OTHER; note = 2'- fluoro
gtcacccccagtctcccacct

SEQ ID NO: 266 - RNA, 21 nt, synthetic construct
  source 1..21: mol_type = other RNA
  modified_base 1: mod_base = OTHER; note = 2'- fluoro, 3'- thiophosphate
  modified_base 2: mod_base = OTHER; note = 2'-O- methyl, 3'- thiophosphate
  modified_base 3: mod_base = OTHER; note = 2'- fluoro
  modified_base 4: mod_base = OTHER; note = 2'-O- methyl
  modified_base 5: mod_base = OTHER; note = 2'- fluoro
  modified_base 6: mod_base = OTHER; note = 2'-O- methyl
  modified_base 7: mod_base = OTHER; note = 2'- fluoro
  modified_base 8: mod_base = OTHER; note = 2'-O- methyl
  modified_base 9: mod_base = OTHER; note = 2'- fluoro
  modified_base 10: mod_base = OTHER; note = 2'-O- methyl
  modified_base 11: mod_base = OTHER; note = 2'- fluoro
  modified_base 12: mod_base = OTHER; note = 2'-O- methyl
  modified_base 13: mod_base = OTHER; note = 2'- fluoro
  modified_base 14: mod_base = OTHER; note = 2'-O- methyl
  modified_base 15: mod_base = OTHER; note = 2'- fluoro
  modified_base 16: mod_base = OTHER; note = 2'-O- methyl
  modified_base 17: mod_base = OTHER; note = 2'- fluoro
  modified_base 18: mod_base = OTHER; note = 2'-O- methyl
  modified_base 19: mod_base = OTHER; note = 2'- fluoro
  modified_base 20: mod_base = OTHER; note = 2'-O- methyl
  modified_base 21: mod_base = OTHER; note = 2'- fluoro
tcacccccagtctcccacctt

SEQ ID NO: 267 - RNA, 21 nt, synthetic construct
  source 1..21: mol_type = other RNA
  modified_base 1: mod_base = OTHER; note = 2'- fluoro, 3'- thiophosphate
  modified_base 2: mod_base = OTHER; note = 2'-O- methyl, 3'- thiophosphate
  modified_base 3: mod_base = OTHER; note = 2'- fluoro
  modified_base 4: mod_base = OTHER; note = 2'-O- methyl
  modified_base 5: mod_base = OTHER; note = 2'- fluoro
  modified_base 6: mod_base = OTHER; note = 2'-O- methyl
  modified_base 7: mod_base = OTHER; note = 2'- fluoro
  modified_base 8: mod_base = OTHER; note = 2'-O- methyl
  modified_base 9: mod_base = OTHER; note = 2'- fluoro
  modified_base 10: mod_base = OTHER; note = 2'-O- methyl
  modified_base 11: mod_base = OTHER; note = 2'- fluoro
  modified_base 12: mod_base = OTHER; note = 2'-O- methyl
  modified_base 13: mod_base = OTHER; note = 2'- fluoro
  modified_base 14: mod_base = OTHER; note = 2'-O- methyl
  modified_base 15: mod_base = OTHER; note = 2'- fluoro
  modified_base 16: mod_base = OTHER; note = 2'-O- methyl
  modified_base 17: mod_base = OTHER; note = 2'- fluoro
  modified_base 18: mod_base = OTHER; note = 2'-O- methyl
  modified_base 19: mod_base = OTHER; note = 2'- fluoro
  modified_base 20: mod_base = OTHER; note = 2'-O- methyl
  modified_base 21: mod_base = OTHER; note = 2'- fluoro
acccccagtctcccacctttt

SEQ ID NO: 268 - RNA, 21 nt, synthetic construct
  source 1..21: mol_type = other RNA
  modified_base 1: mod_base = OTHER; note = 2'- fluoro, 3'- thiophosphate
  modified_base 2: mod_base = OTHER; note = 2'-O- methyl, 3'- thiophosphate
  modified_base 3: mod_base = OTHER; note = 2'- fluoro
  modified_base 4: mod_base = OTHER; note = 2'-O- methyl
  modified_base 5: mod_base = OTHER; note = 2'- fluoro
  modified_base 6: mod_base = OTHER; note = 2'-O- methyl
  modified_base 7: mod_base = OTHER; note = 2'- fluoro
  modified_base 8: mod_base = OTHER; note = 2'-O- methyl
  modified_base 9: mod_base = OTHER; note = 2'- fluoro
  modified_base 10: mod_base = OTHER; note = 2'-O- methyl
  modified_base 11: mod_base = OTHER; note = 2'- fluoro
  modified_base 12: mod_base = OTHER; note = 2'-O- methyl
  modified_base 13: mod_base = OTHER; note = 2'- fluoro
  modified_base 14: mod_base = OTHER; note = 2'-O- methyl
  modified_base 15: mod_base = OTHER; note = 2'- fluoro
  modified_base 16: mod_base = OTHER; note = 2'-O- methyl
  modified_base 17: mod_base = OTHER; note = 2'- fluoro
  modified_base 18: mod_base = OTHER; note = 2'-O- methyl
  modified_base 19: mod_base = OTHER; note = 2'- fluoro
  modified_base 20: mod_base = OTHER; note = 2'-O- methyl
  modified_base 21: mod_base = OTHER; note = 2'- fluoro
atgagtcgactttgagctgga

SEQ ID NO: 269 - RNA, 21 nt, synthetic construct
  source 1..21: mol_type = other RNA
  modified_base 1: mod_base = OTHER; note = 2'- fluoro, 3'- thiophosphate
  modified_base 2: mod_base = OTHER; note = 2'-O- methyl, 3'- thiophosphate
  modified_base 3: mod_base = OTHER; note = 2'- fluoro
  modified_base 4: mod_base = OTHER; note = 2'-O- methyl
  modified_base 5: mod_base = OTHER; note = 2'- fluoro
  modified_base 6: mod_base = OTHER; note = 2'-O- methyl
  modified_base 7: mod_base = OTHER; note = 2'- fluoro
  modified_base 8: mod_base = OTHER; note = 2'-O- methyl
  modified_base 9: mod_base = OTHER; note = 2'- fluoro
  modified_base 10: mod_base = OTHER; note = 2'-O- methyl
  modified_base 11: mod_base = OTHER; note = 2'- fluoro
  modified_base 12: mod_base = OTHER; note = 2'-O- methyl
  modified_base 13: mod_base = OTHER; note = 2'- fluoro
  modified_base 14: mod_base = OTHER; note = 2'-O- methyl
  modified_base 15: mod_base = OTHER; note = 2'- fluoro
  modified_base 16: mod_base = OTHER; note = 2'-O- methyl
  modified_base 17: mod_base = OTHER; note = 2'- fluoro
  modified_base 18: mod_base = OTHER; note = 2'-O- methyl
  modified_base 19: mod_base = OTHER; note = 2'- fluoro
  modified_base 20: mod_base = OTHER; note = 2'-O- methyl
  modified_base 21: mod_base = OTHER; note = 2'- fluoro
tgagtcgactttgagctggaa

SEQ ID NO: 270 - RNA, 21 nt, synthetic construct
  source 1..21: mol_type = other RNA
  modified_base 1: mod_base = OTHER; note = 2'- fluoro, 3'- thiophosphate
  modified_base 2: mod_base = OTHER; note = 2'-O- methyl, 3'- thiophosphate
  modified_base 3: mod_base = OTHER; note = 2'- fluoro
  modified_base 4: mod_base = OTHER; note = 2'-O- methyl
  modified_base 5: mod_base = OTHER; note = 2'- fluoro
  modified_base 6: mod_base = OTHER; note = 2'-O- methyl
  modified_base 7: mod_base = OTHER; note = 2'- fluoro
  modified_base 8: mod_base = OTHER; note = 2'-O- methyl
  modified_base 9: mod_base = OTHER; note = 2'- fluoro
  modified_base 10: mod_base = OTHER; note = 2'-O- methyl
  modified_base 11: mod_base = OTHER; note = 2'- fluoro
  modified_base 12: mod_base = OTHER; note = 2'-O- methyl
  modified_base 13: mod_base = OTHER; note = 2'- fluoro
  modified_base 14: mod_base = OTHER; note = 2'-O- methyl
  modified_base 15: mod_base = OTHER; note = 2'- fluoro
  modified_base 16: mod_base = OTHER; note = 2'-O- methyl
  modified_base 17: mod_base = OTHER; note = 2'- fluoro
  modified_base 18: mod_base = OTHER; note = 2'-O- methyl
  modified_base 19: mod_base = OTHER; note = 2'- fluoro
  modified_base 20: mod_base = OTHER; note = 2'-O- methyl
  modified_base 21: mod_base = OTHER; note = 2'- fluoro
gagtcgactttgagctggaaa

SEQ ID NO: 271 - RNA, 21 nt, synthetic construct
  source 1..21: mol_type = other RNA
  modified_base 1: mod_base = OTHER; note = 2'- fluoro, 3'- thiophosphate
  modified_base 2: mod_base = OTHER; note = 2'-O- methyl, 3'- thiophosphate
  modified_base 3: mod_base = OTHER; note = 2'- fluoro
  modified_base 4: mod_base = OTHER; note = 2'-O- methyl
  modified_base 5: mod_base = OTHER; note = 2'- fluoro
  modified_base 6: mod_base = OTHER; note = 2'-O- methyl
  modified_base 7: mod_base = OTHER; note = 2'- fluoro
  modified_base 8: mod_base = OTHER; note = 2'-O- methyl
  modified_base 9: mod_base = OTHER; note = 2'- fluoro
  modified_base 10: mod_base = OTHER; note = 2'-O- methyl
  modified_base 11: mod_base = OTHER; note = 2'- fluoro
  modified_base 12: mod_base = OTHER; note = 2'-O- methyl
  modified_base 13: mod_base = OTHER; note = 2'- fluoro
  modified_base 14: mod_base = OTHER; note = 2'-O- methyl
  modified_base 15: mod_base = OTHER; note = 2'- fluoro
  modified_base 16: mod_base = OTHER; note = 2'-O- methyl
  modified_base 17: mod_base = OTHER; note = 2'- fluoro
  modified_base 18: mod_base = OTHER; note = 2'-O- methyl
  modified_base 19: mod_base = OTHER; note = 2'- fluoro
  modified_base 20: mod_base = OTHER; note = 2'-O- methyl
  modified_base 21: mod_base = OTHER; note = 2'- fluoro
tcgactttgagctggaaagca

SEQ ID NO: 272 - RNA, 21 nt, synthetic construct
  source 1..21: mol_type = other RNA
  modified_base 1: mod_base = OTHER; note = 2'- fluoro, 3'- thiophosphate
  modified_base 2: mod_base = OTHER; note = 2'-O- methyl, 3'- thiophosphate
  modified_base 3: mod_base = OTHER; note = 2'- fluoro
  modified_base 4: mod_base = OTHER; note = 2'-O- methyl
  modified_base 5: mod_base = OTHER; note = 2'- fluoro
  modified_base 6: mod_base = OTHER; note = 2'-O- methyl
  modified_base 7: mod_base = OTHER; note = 2'- fluoro
  modified_base 8: mod_base = OTHER; note = 2'-O- methyl
  modified_base 9: mod_base = OTHER; note = 2'- fluoro
  modified_base 10: mod_base = OTHER; note = 2'-O- methyl
  modified_base 11: mod_base = OTHER; note = 2'- fluoro
  modified_base 12: mod_base = OTHER; note = 2'-O- methyl
  modified_base 13: mod_base = OTHER; note = 2'- fluoro
  modified_base 14: mod_base = OTHER; note = 2'-O- methyl
  modified_base 15: mod_base = OTHER; note = 2'- fluoro
  modified_base 16: mod_base = OTHER; note = 2'-O- methyl
  modified_base 17: mod_base = OTHER; note = 2'- fluoro
  modified_base 18: mod_base = OTHER; note = 2'-O- methyl
  modified_base 19: mod_base = OTHER; note = 2'- fluoro
  modified_base 20: mod_base = OTHER; note = 2'-O- methyl
  modified_base 21: mod_base = OTHER; note = 2'- fluoro
ttgagctggaaagcagccgtt

SEQ ID NO: 273 - RNA, 21 nt, synthetic construct
  source 1..21: mol_type = other RNA
  modified_base 1: mod_base = OTHER; note = 2'- fluoro, 3'- thiophosphate
  modified_base 2: mod_base = OTHER; note = 2'-O- methyl, 3'- thiophosphate
  modified_base 3: mod_base = OTHER; note = 2'- fluoro
  modified_base 4: mod_base = OTHER; note = 2'-O- methyl
  modified_base 5: mod_base = OTHER; note = 2'- fluoro
  modified_base 6: mod_base = OTHER; note = 2'-O- methyl
  modified_base 7: mod_base = OTHER; note = 2'- fluoro
  modified_base 8: mod_base = OTHER; note = 2'-O- methyl
  modified_base 9: mod_base = OTHER; note = 2'- fluoro
  modified_base 10: mod_base = OTHER; note = 2'-O- methyl
  modified_base 11: mod_base = OTHER; note = 2'- fluoro
  modified_base 12: mod_base = OTHER; note = 2'-O- methyl
  modified_base 13: mod_base = OTHER; note = 2'- fluoro
  modified_base 14: mod_base = OTHER; note = 2'-O- methyl
  modified_base 15: mod_base = OTHER; note = 2'- fluoro
  modified_base 16: mod_base = OTHER; note = 2'-O- methyl
  modified_base 17: mod_base = OTHER; note = 2'- fluoro
  modified_base 18: mod_base = OTHER; note = 2'-O- methyl
  modified_base 19: mod_base = OTHER; note = 2'- fluoro
  modified_base 20: mod_base = OTHER; note = 2'-O- methyl
  modified_base 21: mod_base = OTHER; note = 2'- fluoro
tgagctggaaagcagccgttt

SEQ ID NO: 274 - RNA, 21 nt, synthetic construct
  source 1..21: mol_type = other RNA
  modified_base 1: mod_base = OTHER; note = 2'- fluoro, 3'- thiophosphate
  modified_base 2: mod_base = OTHER; note = 2'-O- methyl, 3'- thiophosphate
  modified_base 3: mod_base = OTHER; note = 2'- fluoro
  modified_base 4: mod_base = OTHER; note = 2'-O- methyl
  modified_base 5: mod_base = OTHER; note = 2'- fluoro
  modified_base 6: mod_base = OTHER; note = 2'-O- methyl
  modified_base 7: mod_base = OTHER; note = 2'- fluoro
  modified_base 8: mod_base = OTHER; note = 2'-O- methyl
  modified_base 9: mod_base = OTHER; note = 2'- fluoro
  modified_base 10: mod_base = OTHER; note = 2'-O- methyl
  modified_base 11: mod_base = OTHER; note = 2'- fluoro
  modified_base 12: mod_base = OTHER; note = 2'-O- methyl
  modified_base 13: mod_base = OTHER; note = 2'- fluoro
  modified_base 14: mod_base = OTHER; note = 2'-O- methyl
  modified_base 15: mod_base = OTHER; note = 2'- fluoro
  modified_base 16: mod_base = OTHER; note = 2'-O- methyl
  modified_base 17: mod_base = OTHER; note = 2'- fluoro
  modified_base 18: mod_base = OTHER; note = 2'-O- methyl
  modified_base 19: mod_base = OTHER; note = 2'- fluoro
  modified_base 20: mod_base = OTHER; note = 2'-O- methyl
  modified_base 21: mod_base = OTHER; note = 2'- fluoro
tggaaagcagccgtttctcct

SEQ ID NO: 275 - RNA, 21 nt, synthetic construct
  source 1..21: mol_type = other RNA
  modified_base 1: mod_base = OTHER; note = 2'- fluoro, 3'- thiophosphate
  modified_base 2: mod_base = OTHER; note = 2'-O- methyl, 3'- thiophosphate
  modified_base 3: mod_base = OTHER; note = 2'- fluoro
  modified_base 4: mod_base = OTHER; note = 2'-O- methyl
  modified_base 5: mod_base = OTHER; note = 2'- fluoro
  modified_base 6: mod_base = OTHER; note = 2'-O- methyl
  modified_base 7: mod_base = OTHER; note = 2'- fluoro
  modified_base 8: mod_base = OTHER; note = 2'-O- methyl
  modified_base 9: mod_base = OTHER; note = 2'- fluoro
  modified_base 10: mod_base = OTHER; note = 2'-O- methyl
  modified_base 11: mod_base = OTHER; note = 2'- fluoro
  modified_base 12: mod_base = OTHER; note = 2'-O- methyl
  modified_base 13: mod_base = OTHER; note = 2'- fluoro
  modified_base 14: mod_base = OTHER; note = 2'-O- methyl
  modified_base 15: mod_base = OTHER; note = 2'- fluoro
  modified_base 16: mod_base = OTHER; note = 2'-O- methyl
  modified_base 17: mod_base = OTHER; note = 2'- fluoro
  modified_base 18: mod_base = OTHER; note = 2'-O- methyl
  modified_base 19: mod_base = OTHER; note = 2'- fluoro
  modified_base 20: mod_base = OTHER; note = 2'-O- methyl
  modified_base 21: mod_base = OTHER; note = 2'- fluoro
aagcagccgtttctccttggt

SEQ ID NO: 276 - RNA, 21 nt, synthetic construct
  source 1..21: mol_type = other RNA
  modified_base 1: mod_base = OTHER; note = 2'- fluoro, 3'- thiophosphate
  modified_base 2: mod_base = OTHER; note = 2'-O- methyl, 3'- thiophosphate
  modified_base 3: mod_base = OTHER; note = 2'- fluoro
  modified_base 4: mod_base = OTHER; note = 2'-O- methyl
  modified_base 5: mod_base = OTHER; note = 2'- fluoro
  modified_base 6: mod_base = OTHER; note = 2'-O- methyl
  modified_base 7: mod_base = OTHER; note = 2'- fluoro
  modified_base 8: mod_base = OTHER; note = 2'-O- methyl
  modified_base 9: mod_base = OTHER; note = 2'- fluoro
  modified_base 10: mod_base = OTHER; note = 2'-O- methyl
  modified_base 11: mod_base = OTHER; note = 2'- fluoro
  modified_base 12: mod_base = OTHER; note = 2'-O- methyl
  modified_base 13: mod_base = OTHER; note = 2'- fluoro
  modified_base 14: mod_base = OTHER; note = 2'-O- methyl
  modified_base 15: mod_base = OTHER; note = 2'- fluoro
  modified_base 16: mod_base = OTHER; note = 2'-O- methyl
  modified_base 17: mod_base = OTHER; note = 2'- fluoro
  modified_base 18: mod_base = OTHER; note = 2'-O- methyl
  modified_base 19: mod_base = OTHER; note = 2'- fluoro
  modified_base 20: mod_base = OTHER; note = 2'-O- methyl
  modified_base 21: mod_base = OTHER; note = 2'- fluoro
caaccgaccagcttgtttgta

SEQ ID NO: 277 - RNA, 21 nt, synthetic construct
  source 1..21: mol_type = other RNA
  modified_base 1: mod_base = OTHER; note = 2'- fluoro, 3'- thiophosphate
  modified_base 2: mod_base = OTHER; note = 2'-O- methyl, 3'- thiophosphate
  modified_base 3: mod_base = OTHER; note = 2'- fluoro
  modified_base 4: mod_base = OTHER; note = 2'-O- methyl
  modified_base 5: mod_base = OTHER; note = 2'- fluoro
  modified_base 6: mod_base = OTHER; note = 2'-O- methyl
  modified_base 7: mod_base = OTHER; note = 2'- fluoro
  modified_base 8: mod_base = OTHER; note = 2'-O- methyl
  modified_base 9: mod_base = OTHER; note = 2'- fluoro
  modified_base 10: mod_base = OTHER; note = 2'-O- methyl
  modified_base 11: mod_base = OTHER; note = 2'- fluoro
  modified_base 12: mod_base = OTHER; note = 2'-O- methyl
  modified_base 13: mod_base = OTHER; note = 2'- fluoro
  modified_base 14: mod_base = OTHER; note = 2'-O- methyl
  modified_base 15: mod_base = OTHER; note = 2'- fluoro
  modified_base 16: mod_base = OTHER; note = 2'-O- methyl
  modified_base 17: mod_base = OTHER; note = 2'- fluoro
  modified_base 18: mod_base = OTHER; note = 2'-O- methyl
  modified_base 19: mod_base = OTHER; note = 2'- fluoro
  modified_base 20: mod_base = OTHER; note = 2'-O- methyl
  modified_base 21: mod_base = OTHER; note = 2'- fluoro
tttgtgaaacaaaaaagtgtt

SEQ ID NO: 278 - RNA, 21 nt, synthetic construct
  source 1..21: mol_type = other RNA
  modified_base 1: mod_base = OTHER; note = 2'- fluoro, 3'- thiophosphate
  modified_base 2: mod_base = OTHER; note = 2'-O- methyl, 3'- thiophosphate
  modified_base 3: mod_base = OTHER; note = 2'- fluoro
  modified_base 4: mod_base = OTHER; note = 2'-O- methyl
  modified_base 5: mod_base = OTHER; note = 2'- fluoro
  modified_base 6: mod_base = OTHER; note = 2'-O- methyl
  modified_base 7: mod_base = OTHER; note = 2'- fluoro
  modified_base 8: mod_base = OTHER; note = 2'-O- methyl
  modified_base 9: mod_base = OTHER; note = 2'- fluoro
  modified_base 10: mod_base = OTHER; note = 2'-O- methyl
  modified_base 11: mod_base = OTHER; note = 2'- fluoro
  modified_base 12: mod_base = OTHER; note = 2'-O- methyl
  modified_base 13: mod_base = OTHER; note = 2'- fluoro
  modified_base 14: mod_base = OTHER; note = 2'-O- methyl
  modified_base 15: mod_base = OTHER; note = 2'- fluoro
  modified_base 16: mod_base = OTHER; note = 2'-O- methyl
  modified_base 17: mod_base = OTHER; note = 2'- fluoro
  modified_base 18: mod_base = OTHER; note = 2'-O- methyl
  modified_base 19: mod_base = OTHER; note = 2'- fluoro
  modified_base 20: mod_base = OTHER; note = 2'-O- methyl
  modified_base 21: mod_base = OTHER; note = 2'- fluoro
aaacaaaaaagtgttcccttt

SEQ ID NO: 279 - RNA, 20 nt, synthetic construct
  source 1..20: mol_type = other RNA
  modified_base 1: mod_base = OTHER; note = 2'-O- methyl, 3'- thiophosphate
  modified_base 2: mod_base = OTHER; note = 2'- fluoro, 3'- thiophosphate
  modified_base 3: mod_base = OTHER; note = 2'-O- methyl
  modified_base 4: mod_base = OTHER; note = 2'- fluoro
  modified_base 5: mod_base = OTHER; note = 2'-O- methyl
  modified_base 6: mod_base = OTHER; note = 2'- fluoro
  modified_base 7: mod_base = OTHER; note = 2'-O- methyl
  modified_base 8: mod_base = OTHER; note = 2'- fluoro
  modified_base 9: mod_base = OTHER; note = 2'-O- methyl
  modified_base 10: mod_base = OTHER; note = 2'- fluoro
  modified_base 11: mod_base = OTHER; note = 2'-O- methyl
  modified_base 12: mod_base = OTHER; note = 2'- fluoro
  modified_base 13: mod_base = OTHER; note = 2'-O- methyl
  modified_base 14: mod_base = OTHER; note = 2'- fluoro
  modified_base 15: mod_base = OTHER; note = 2'-O- methyl
  modified_base 16: mod_base = OTHER; note = 2'- fluoro
  modified_base 17: mod_base = OTHER; note = 2'-O- methyl
  modified_base 18: mod_base = OTHER; note = 2'- fluoro
  modified_base 19: mod_base = OTHER; note = 2'-O- methyl
  modified_base 20: mod_base = OTHER; note = 2'- fluoro
acaaaaaagtgttccctttt

SEQ ID NO: 280 - RNA, 21 nt, synthetic construct
  source 1..21: mol_type = other RNA
  modified_base 1: mod_base = OTHER; note = 2'- fluoro, 3'- thiophosphate
  modified_base 2: mod_base = OTHER; note = 2'-O- methyl, 3'- thiophosphate
  modified_base 3: mod_base = OTHER; note = 2'- fluoro
  modified_base 4: mod_base = OTHER; note = 2'-O- methyl
  modified_base 5: mod_base = OTHER; note = 2'- fluoro
  modified_base 6: mod_base = OTHER; note = 2'-O- methyl
  modified_base 7: mod_base = OTHER; note = 2'- fluoro
  modified_base 8: mod_base = OTHER; note = 2'-O- methyl
  modified_base 9: mod_base = OTHER; note = 2'- fluoro
  modified_base 10: mod_base = OTHER; note = 2'-O- methyl
  modified_base 11: mod_base = OTHER; note = 2'- fluoro
  modified_base 12: mod_base = OTHER; note = 2'-O- methyl
  modified_base 13: mod_base = OTHER; note = 2'- fluoro
  modified_base 14: mod_base = OTHER; note = 2'-O- methyl
  modified_base 15: mod_base = OTHER; note = 2'- fluoro
  modified_base 16: mod_base = OTHER; note = 2'-O- methyl
  modified_base 17: mod_base = OTHER; note = 2'- fluoro
  modified_base 18: mod_base = OTHER; note = 2'-O- methyl
  modified_base 19: mod_base = OTHER; note = 2'- fluoro
  modified_base 20: mod_base = OTHER; note = 2'-O- methyl
  modified_base 21: mod_base = OTHER; note = 2'- fluoro
caaaaaagtgttcccttttca

SEQ ID NO: 281 - RNA, 21 nt, synthetic construct
  source 1..21: mol_type = other RNA
  modified_base 1: mod_base = OTHER; note = 2'- fluoro, 3'- thiophosphate
  modified_base 2: mod_base = OTHER; note = 2'-O- methyl, 3'- thiophosphate
  modified_base 3: mod_base = OTHER; note = 2'- fluoro
  modified_base 4: mod_base = OTHER; note = 2'-O- methyl
  modified_base 5: mod_base = OTHER; note = 2'- fluoro
  modified_base 6: mod_base = OTHER; note = 2'-O- methyl
  modified_base 7: mod_base = OTHER; note = 2'- fluoro
  modified_base 8: mod_base = OTHER; note = 2'-O- methyl
  modified_base 9: mod_base = OTHER; note = 2'- fluoro
  modified_base 10: mod_base = OTHER; note = 2'-O- methyl
  modified_base 11: mod_base = OTHER; note = 2'- fluoro
  modified_base 12: mod_base = OTHER; note = 2'-O- methyl
  modified_base 13: mod_base = OTHER; note = 2'- fluoro
  modified_base 14: mod_base = OTHER; note = 2'-O- methyl
  modified_base 15: mod_base = OTHER; note = 2'- fluoro
  modified_base 16: mod_base = OTHER; note = 2'-O- methyl
  modified_base 17: mod_base = OTHER; note = 2'- fluoro
  modified_base 18: mod_base = OTHER; note = 2'-O- methyl
  modified_base 19: mod_base = OTHER; note = 2'- fluoro
  modified_base 20: mod_base = OTHER; note = 2'-O- methyl
  modified_base 21: mod_base = OTHER; note = 2'- fluoro
tcccttttcaagttgagaaca

SEQ ID NO: 282 - RNA, 21 nt, synthetic construct
  source 1..21: mol_type = other RNA
  modified_base 1: mod_base = OTHER; note = 2'- fluoro, 3'- thiophosphate
  modified_base 2: mod_base = OTHER; note = 2'-O- methyl, 3'- thiophosphate
  modified_base 3: mod_base = OTHER; note = 2'- fluoro
  modified_base 4: mod_base = OTHER; note = 2'-O- methyl
  modified_base 5: mod_base = OTHER; note = 2'- fluoro
  modified_base 6: mod_base = OTHER; note = 2'-O- methyl
  modified_base 7: mod_base = OTHER; note = 2'- fluoro
  modified_base 8: mod_base = OTHER; note = 2'-O- methyl
  modified_base 9: mod_base = OTHER; note = 2'- fluoro
  modified_base 10: mod_base = OTHER; note = 2'-O- methyl
  modified_base 11: mod_base = OTHER; note = 2'- fluoro
  modified_base 12: mod_base = OTHER; note = 2'-O- methyl
  modified_base 13: mod_base = OTHER; note = 2'- fluoro
  modified_base 14: mod_base = OTHER; note = 2'-O- methyl
  modified_base 15: mod_base = OTHER; note = 2'- fluoro
  modified_base 16: mod_base = OTHER; note = 2'-O- methyl
  modified_base 17: mod_base = OTHER; note = 2'- fluoro
  modified_base 18: mod_base = OTHER; note = 2'-O- methyl
  modified_base 19: mod_base = OTHER; note = 2'- fluoro
  modified_base 20: mod_base = OTHER; note = 2'-O- methyl
  modified_base 21: mod_base = OTHER; note = 2'- fluoro
cccttttcaagttgagaacaa

SEQ ID NO: 283 - RNA, 21 nt, synthetic construct
  source 1..21: mol_type = other RNA
  modified_base 1: mod_base = OTHER; note = 2'- fluoro, 3'- thiophosphate
  modified_base 2: mod_base = OTHER; note = 2'-O- methyl, 3'- thiophosphate
  modified_base 3: mod_base = OTHER; note = 2'- fluoro
  modified_base 4: mod_base = OTHER; note = 2'-O- methyl
  modified_base 5: mod_base = OTHER; note = 2'- fluoro
  modified_base 6: mod_base = OTHER; note = 2'-O- methyl
  modified_base 7: mod_base = OTHER; note = 2'- fluoro
  modified_base 8: mod_base = OTHER; note = 2'-O- methyl
  modified_base 9: mod_base = OTHER; note = 2'- fluoro
  modified_base 10: mod_base = OTHER; note = 2'-O- methyl
  modified_base 11: mod_base = OTHER; note = 2'- fluoro
  modified_base 12: mod_base = OTHER; note = 2'-O- methyl
  modified_base 13: mod_base = OTHER; note = 2'- fluoro
  modified_base 14: mod_base = OTHER; note = 2'-O- methyl
  modified_base 15: mod_base = OTHER; note = 2'- fluoro
  modified_base 16: mod_base = OTHER; note = 2'-O- methyl
  modified_base 17: mod_base = OTHER; note = 2'- fluoro
  modified_base 18: mod_base = OTHER; note = 2'-O- methyl
  modified_base 19: mod_base = OTHER; note = 2'- fluoro
  modified_base 20: mod_base = OTHER; note = 2'-O- methyl
  modified_base 21: mod_base = OTHER; note = 2'- fluoro
ttttcaagttgagaacaaaaa

SEQ ID NO: 284 - RNA, 21 nt, synthetic construct
  source 1..21: mol_type = other RNA
  modified_base 1: mod_base = OTHER; note = 2'- fluoro, 3'- thiophosphate
  modified_base 2: mod_base = OTHER; note = 2'-O- methyl, 3'- thiophosphate
  modified_base 3: mod_base = OTHER; note = 2'- fluoro
  modified_base 4: mod_base = OTHER; note = 2'-O- methyl
  modified_base 5: mod_base = OTHER; note = 2'- fluoro
  modified_base 6: mod_base = OTHER; note = 2'-O- methyl
  modified_base 7: mod_base = OTHER; note = 2'- fluoro
  modified_base 8: mod_base = OTHER; note = 2'-O- methyl
  modified_base 9: mod_base = OTHER; note = 2'- fluoro
  modified_base 10: mod_base = OTHER; note = 2'-O- methyl
  modified_base 11: mod_base = OTHER; note = 2'- fluoro
  modified_base 12: mod_base = OTHER; note = 2'-O- methyl
  modified_base 13: mod_base = OTHER; note = 2'- fluoro
  modified_base 14: mod_base = OTHER; note = 2'-O- methyl
  modified_base 15: mod_base = OTHER; note = 2'- fluoro
  modified_base 16: mod_base = OTHER; note = 2'-O- methyl
  modified_base 17: mod_base = OTHER; note = 2'- fluoro
  modified_base 18: mod_base = OTHER; note = 2'-O- methyl
  modified_base 19: mod_base = OTHER; note = 2'- fluoro
  modified_base 20: mod_base = OTHER; note = 2'-O- methyl
  modified_base 21: mod_base = OTHER; note = 2'- fluoro
tttcaagttgagaacaaaaat

SEQ ID NO: 285 - RNA, 21 nt, synthetic construct
  source 1..21: mol_type = other RNA
  modified_base 1: mod_base = OTHER; note = 2'- fluoro, 3'- thiophosphate
  modified_base 2: mod_base = OTHER; note = 2'-O- methyl, 3'- thiophosphate
  modified_base 3: mod_base = OTHER; note = 2'- fluoro
  modified_base 4: mod_base = OTHER; note = 2'-O- methyl
  modified_base 5: mod_base = OTHER; note = 2'- fluoro
  modified_base 6: mod_base = OTHER; note = 2'-O- methyl
  modified_base 7: mod_base = OTHER; note = 2'- fluoro
  modified_base 8: mod_base = OTHER; note = 2'-O- methyl
  modified_base 9: mod_base = OTHER; note = 2'- fluoro
  modified_base 10: mod_base = OTHER; note = 2'-O- methyl
  modified_base 11: mod_base = OTHER; note = 2'- fluoro
  modified_base 12: mod_base = OTHER; note = 2'-O- methyl
  modified_base 13: mod_base = OTHER; note = 2'- fluoro
  modified_base 14: mod_base = OTHER; note = 2'-O- methyl
  modified_base 15: mod_base = OTHER; note = 2'- fluoro
  modified_base 16: mod_base = OTHER; note = 2'-O- methyl
  modified_base 17: mod_base = OTHER; note = 2'- fluoro
  modified_base 18: mod_base = OTHER; note = 2'-O- methyl
  modified_base 19: mod_base = OTHER; note = 2'- fluoro
  modified_base 20: mod_base = OTHER; note = 2'-O- methyl
  modified_base 21: mod_base = OTHER; note = 2'- fluoro
tcaagttgagaacaaaaattg

SEQ ID NO: 286 - RNA, 21 nt, synthetic construct
  source 1..21: mol_type = other RNA
  modified_base 1: mod_base = OTHER; note = 2'- fluoro, 3'- thiophosphate
  modified_base 2: mod_base = OTHER; note = 2'-O- methyl, 3'- thiophosphate
  modified_base 3: mod_base = OTHER; note = 2'- fluoro
  modified_base 4: mod_base = OTHER; note = 2'-O- methyl
  modified_base 5: mod_base = OTHER; note = 2'- fluoro
  modified_base 6: mod_base = OTHER; note = 2'-O- methyl
  modified_base 7: mod_base = OTHER; note = 2'- fluoro
  modified_base 8: mod_base = OTHER; note = 2'-O- methyl
  modified_base 9: mod_base = OTHER; note = 2'- fluoro
  modified_base 10: mod_base = OTHER; note = 2'-O- methyl
  modified_base 11: mod_base = OTHER; note = 2'- fluoro
  modified_base 12: mod_base = OTHER; note = 2'-O- methyl
  modified_base 13: mod_base = OTHER; note = 2'- fluoro
  modified_base 14: mod_base = OTHER; note = 2'-O- methyl
  modified_base 15: mod_base = OTHER; note = 2'- fluoro
  modified_base 16: mod_base = OTHER; note = 2'-O- methyl
  modified_base 17: mod_base = OTHER; note = 2'- fluoro
  modified_base 18: mod_base = OTHER; note = 2'-O- methyl
  modified_base 19: mod_base = OTHER; note = 2'- fluoro
  modified_base 20: mod_base = OTHER; note = 2'-O- methyl
  modified_base 21: mod_base = OTHER; note = 2'- fluoro
acaaaaattgggttttaaaat

SEQ ID NO: 287 - RNA, 20 nt, synthetic construct
  source 1..20: mol_type = other RNA
  modified_base 1: mod_base = OTHER; note = 2'-O- methyl, 3'- thiophosphate
  modified_base 2: mod_base = OTHER; note = 2'- fluoro, 3'- thiophosphate
  modified_base 3: mod_base = OTHER; note = 2'-O- methyl
  modified_base 4: mod_base = OTHER; note = 2'- fluoro
  modified_base 5: mod_base = OTHER; note = 2'-O- methyl
  modified_base 6: mod_base = OTHER; note = 2'- fluoro
  modified_base 7: mod_base = OTHER; note = 2'-O- methyl
  modified_base 8: mod_base = OTHER; note = 2'- fluoro
  modified_base 9: mod_base = OTHER; note = 2'-O- methyl
  modified_base 10: mod_base = OTHER; note = 2'- fluoro
  modified_base 11: mod_base = OTHER; note = 2'-O- methyl
  modified_base 12: mod_base = OTHER; note = 2'- fluoro
  modified_base 13: mod_base = OTHER; note = 2'-O- methyl
  modified_base 14: mod_base = OTHER; note = 2'- fluoro
  modified_base 15: mod_base = OTHER; note = 2'-O- methyl
  modified_base 16: mod_base = OTHER; note = 2'- fluoro
  modified_base 17: mod_base = OTHER; note = 2'-O- methyl
  modified_base 18: mod_base = OTHER; note = 2'- fluoro
  modified_base 19: mod_base = OTHER; note = 2'-O- methyl
  modified_base 20: mod_base = OTHER; note = 2'- fluoro
ggttttaaaattaaagtata

SEQ ID NO: 288 - RNA, 21 nt, synthetic construct
  source 1..21: mol_type = other RNA
  modified_base 1: mod_base = OTHER; note = 2'- fluoro, 3'- thiophosphate
  modified_base 2: mod_base = OTHER; note = 2'-O- methyl, 3'- thiophosphate
  modified_base 3: mod_base = OTHER; note = 2'- fluoro
  modified_base 4: mod_base = OTHER; note = 2'-O- methyl
  modified_base 5: mod_base = OTHER; note = 2'- fluoro
  modified_base 6: mod_base = OTHER; note = 2'-O- methyl
  modified_base 7: mod_base = OTHER; note = 2'- fluoro
  modified_base 8: mod_base = OTHER; note = 2'-O- methyl
  modified_base 9: mod_base = OTHER; note = 2'- fluoro
  modified_base 10: mod_base = OTHER; note = 2'-O- methyl
  modified_base 11: mod_base = OTHER; note = 2'- fluoro
  modified_base 12: mod_base = OTHER; note = 2'-O- methyl
  modified_base 13: mod_base = OTHER; note = 2'- fluoro
  modified_base 14: mod_base = OTHER; note = 2'-O- methyl
  modified_base 15: mod_base = OTHER; note = 2'- fluoro
  modified_base 16: mod_base = OTHER; note = 2'-O- methyl
  modified_base 17: mod_base = OTHER; note = 2'- fluoro
  modified_base 18: mod_base = OTHER; note = 2'-O- methyl
  modified_base 19: mod_base = OTHER; note = 2'- fluoro
  modified_base 20: mod_base = OTHER; note = 2'-O- methyl
  modified_base 21: mod_base = OTHER; note = 2'- fluoro
atagctggttatttctccctt

SEQ ID NO: 289 - RNA, 21 nt, synthetic construct
  source 1..21: mol_type = other RNA
  modified_base 1: mod_base = OTHER; note = 2'- fluoro, 3'- thiophosphate
  modified_base 2: mod_base = OTHER; note = 2'-O- methyl, 3'- thiophosphate
  modified_base 3: mod_base = OTHER; note = 2'- fluoro
  modified_base 4: mod_base = OTHER; note = 2'-O- methyl
  modified_base 5: mod_base = OTHER; note = 2'- fluoro
  modified_base 6: mod_base = OTHER; note = 2'-O- methyl
  modified_base 7: mod_base = OTHER; note = 2'- fluoro
  modified_base 8: mod_base = OTHER; note = 2'-O- methyl
  modified_base 9: mod_base = OTHER; note = 2'- fluoro
  modified_base 10: mod_base = OTHER; note = 2'-O- methyl
  modified_base 11: mod_base = OTHER; note = 2'- fluoro
  modified_base 12: mod_base = OTHER; note = 2'-O- methyl
  modified_base 13: mod_base = OTHER; note = 2'- fluoro
  modified_base 14: mod_base = OTHER; note = 2'-O- methyl
  modified_base 15: mod_base = OTHER; note = 2'- fluoro
  modified_base 16: mod_base = OTHER; note = 2'-O- methyl
  modified_base 17: mod_base = OTHER; note = 2'- fluoro
  modified_base 18: mod_base = OTHER; note = 2'-O- methyl
  modified_base 19: mod_base = OTHER; note = 2'- fluoro
  modified_base 20: mod_base = OTHER; note = 2'-O- methyl
  modified_base 21: mod_base = OTHER; note = 2'- fluoro
agctggttatttctcccttgt

SEQ ID NO: 290 - RNA, 21 nt, synthetic construct
  source 1..21: mol_type = other RNA
  modified_base 1: mod_base = OTHER; note = 2'- fluoro, 3'- thiophosphate
  modified_base 2: mod_base = OTHER; note = 2'-O- methyl, 3'- thiophosphate
  modified_base 3: mod_base = OTHER; note = 2'- fluoro
  modified_base 4: mod_base = OTHER; note = 2'-O- methyl
  modified_base 5: mod_base = OTHER; note = 2'- fluoro
  modified_base 6: mod_base = OTHER; note = 2'-O- methyl
  modified_base 8: mod_base = OTHER; note = 2'-O- methyl
  modified_base 10: mod_base = OTHER; note = 2'-O- methyl
  modified_base 12: mod_base = OTHER; note = 2'-O- methyl
  modified_base 14: mod_base = OTHER; note = 2'-O- methyl
  modified_base 16: mod_base = OTHER; note = 2'-O- methyl
  modified_base 18: mod_base = OTHER; note = 2'-O- methyl
  modified_base 20: mod_base = OTHER; note = 2'-O- methyl
  modified_base 7: mod_base = OTHER; note = 2'- fluoro
  modified_base 9: mod_base = OTHER; note = 2'- fluoro
  modified_base 11: mod_base = OTHER; note = 2'- fluoro
  modified_base 13: mod_base = OTHER; note = 2'- fluoro
  modified_base 15: mod_base = OTHER; note = 2'- fluoro
  modified_base 17: mod_base = OTHER; note = 2'- fluoro
  modified_base 19: mod_base = OTHER; note = 2'- fluoro
  modified_base 21: mod_base = OTHER; note = 2'- fluoro
gttatttctcccttgtgttaa

SEQ ID NO: 291 - RNA, 21 nt, synthetic construct
  source 1..21: mol_type = other RNA
  modified_base 1: mod_base = OTHER; note = 2'- fluoro, 3'- thiophosphate
  modified_base 2: mod_base = OTHER; note = 2'-O- methyl, 3'- thiophosphate
  modified_base 4: mod_base = OTHER; note = 2'-O- methyl
  modified_base 6: mod_base = OTHER; note = 2'-O- methyl
  modified_base 8: mod_base = OTHER; note = 2'-O- methyl
  modified_base 10: mod_base = OTHER; note = 2'-O- methyl
  modified_base 12: mod_base = OTHER; note = 2'-O- methyl
  modified_base 14: mod_base = OTHER; note = 2'-O- methyl
  modified_base 16: mod_base = OTHER; note = 2'-O- methyl
  modified_base 18: mod_base = OTHER; note = 2'-O- methyl
  modified_base 20: mod_base = OTHER; note = 2'-O- methyl
  modified_base 3: mod_base = OTHER; note = 2'- fluoro
  modified_base 7: mod_base = OTHER; note = 2'- fluoro
  modified_base 5: mod_base = OTHER; note = 2'- fluoro
  modified_base 9: mod_base = OTHER; note = 2'- fluoro
  modified_base 11: mod_base = OTHER; note = 2'- fluoro
  modified_base 13: mod_base = OTHER; note = 2'- fluoro
  modified_base 15: mod_base = OTHER; note = 2'- fluoro
  modified_base 17: mod_base = OTHER; note = 2'- fluoro
  modified_base 19: mod_base = OTHER; note = 2'- fluoro
  modified_base 21: mod_base = OTHER; note = 2'- fluoro
ttctcccttgtgttagtaata

SEQ ID NO: 292 - RNA, 21 nt, synthetic construct
  source 1..21: mol_type = other RNA
  modified_base 1: mod_base = OTHER; note = 2'- fluoro, 3'- thiophosphate
  modified_base 2: mod_base = OTHER; note = 2'-O- methyl, 3'- thiophosphate
  modified_base 4: mod_base = OTHER; note = 2'-O- methyl
  modified_base 6: mod_base = OTHER; note = 2'-O- methyl
  modified_base 8: mod_base = OTHER; note = 2'-O- methyl
  modified_base 10: mod_base = OTHER; note = 2'-O- methyl
  modified_base 12: mod_base = OTHER; note = 2'-O- methyl
  modified_base 14: mod_base = OTHER; note = 2'-O- methyl
  modified_base 16: mod_base = OTHER; note = 2'-O- methyl
  modified_base 18: mod_base = OTHER; note = 2'-O- methyl
  modified_base 20: mod_base = OTHER; note = 2'-O- methyl
  modified_base 3: mod_base = OTHER; note = 2'- fluoro
  modified_base 5: mod_base = OTHER; note = 2'- fluoro
  modified_base 7: mod_base = OTHER; note = 2'- fluoro
  modified_base 9: mod_base = OTHER; note = 2'- fluoro
  modified_base 11: mod_base = OTHER; note = 2'- fluoro
  modified_base 13: mod_base = OTHER; note = 2'- fluoro
  modified_base 15: mod_base = OTHER; note = 2'- fluoro
  modified_base 17: mod_base = OTHER; note = 2'- fluoro
  modified_base 19: mod_base = OTHER; note = 2'- fluoro
  modified_base 21: mod_base = OTHER; note = 2'- fluoro
tctcccttgtgttagtaataa

SEQ ID NO: 293 - RNA, 21 nt, synthetic construct
  source 1..21: mol_type = other RNA
  modified_base 1: mod_base = OTHER; note = 2'- fluoro, 3'- thiophosphate
  modified_base 2: mod_base = OTHER; note = 2'-O- methyl, 3'- thiophosphate
  modified_base 4: mod_base = OTHER; note = 2'-O- methyl
  modified_base 6: mod_base = OTHER; note = 2'-O- methyl
  modified_base 8: mod_base = OTHER; note = 2'-O- methyl
  modified_base 10: mod_base = OTHER; note = 2'-O- methyl
  modified_base 12: mod_base = OTHER; note = 2'-O- methyl
  modified_base 14: mod_base = OTHER; note = 2'-O- methyl
  modified_base 16: mod_base = OTHER; note = 2'-O- methyl
  modified_base 18: mod_base = OTHER; note = 2'-O- methyl
  modified_base 20: mod_base = OTHER; note = 2'-O- methyl
  modified_base 3: mod_base = OTHER; note = 2'- fluoro
  modified_base 5: mod_base = OTHER; note = 2'- fluoro
  modified_base 7: mod_base = OTHER; note = 2'- fluoro
  modified_base 9: mod_base = OTHER; note = 2'- fluoro
  modified_base 11: mod_base = OTHER; note = 2'- fluoro
  modified_base 13: mod_base = OTHER; note = 2'- fluoro
  modified_base 15: mod_base = OTHER; note = 2'- fluoro
  modified_base 17: mod_base = OTHER; note = 2'- fluoro
  modified_base 19: mod_base = OTHER; note = 2'- fluoro
  modified_base 21: mod_base = OTHER; note = 2'- fluoro
ctcccttgtgttagtaataaa

SEQ ID NO: 294 - RNA, 21 nt, synthetic construct
  source 1..21: mol_type = other RNA
  modified_base 1: mod_base = OTHER; note = 2'- fluoro, 3'- thiophosphate
  modified_base 2: mod_base = OTHER; note = 2'-O- methyl, 3'- thiophosphate
  modified_base 4: mod_base = OTHER; note = 2'-O- methyl
  modified_base 6: mod_base = OTHER; note = 2'-O- methyl
  modified_base 8: mod_base = OTHER; note = 2'-O- methyl
  modified_base 10: mod_base = OTHER; note = 2'-O- methyl
  modified_base 12: mod_base = OTHER; note = 2'-O- methyl
  modified_base 14: mod_base = OTHER; note = 2'-O- methyl
  modified_base 16: mod_base = OTHER; note = 2'-O- methyl
  modified_base 18: mod_base = OTHER; note = 2'-O- methyl
  modified_base 20: mod_base = OTHER; note = 2'-O- methyl
  modified_base 3: mod_base = OTHER; note = 2'- fluoro
  modified_base 5: mod_base = OTHER; note = 2'- fluoro
  modified_base 7: mod_base = OTHER; note = 2'- fluoro
  modified_base 9: mod_base = OTHER; note = 2'- fluoro
  modified_base 11: mod_base = OTHER; note = 2'- fluoro
  modified_base 13: mod_base = OTHER; note = 2'- fluoro
  modified_base 15: mod_base = OTHER; note = 2'- fluoro
  modified_base 17: mod_base = OTHER; note = 2'- fluoro
  modified_base 19: mod_base = OTHER; note = 2'- fluoro
  modified_base 21: mod_base = OTHER; note = 2'- fluoro
tcccttgtgttagtaataaaa

SEQ ID NO: 295 - RNA, 21 nt, synthetic construct
  source 1..21: mol_type = other RNA
  modified_base 1: mod_base = OTHER; note = 2'- fluoro, 3'- thiophosphate
  modified_base 2: mod_base = OTHER; note = 2'-O- methyl, 3'- thiophosphate
  modified_base 3: mod_base = OTHER; note = 2'- fluoro
  modified_base 4: mod_base = OTHER; note = 2'-O- methyl
  modified_base 5: mod_base = OTHER; note = 2'- fluoro
  modified_base 6: mod_base = OTHER; note = 2'-O- methyl
  modified_base 7: mod_base = OTHER; note = 2'- fluoro
  modified_base 8: mod_base = OTHER; note = 2'-O- methyl
  modified_base 9: mod_base = OTHER; note = 2'- fluoro
  modified_base 10: mod_base = OTHER; note = 2'-O- methyl
  modified_base 11: mod_base = OTHER; note = 2'- fluoro
  modified_base 12: mod_base = OTHER; note = 2'-O- methyl
  modified_base 13: mod_base = OTHER; note = 2'- fluoro
  modified_base 14: mod_base = OTHER; note = 2'-O- methyl
  modified_base 15: mod_base = OTHER; note = 2'- fluoro
  modified_base 16: mod_base = OTHER; note = 2'-O- methyl
  modified_base 17: mod_base = OTHER; note = 2'- fluoro
  modified_base 18: mod_base = OTHER; note = 2'-O- methyl
  modified_base 19: mod_base = OTHER; note = 2'- fluoro
  modified_base 20: mod_base = OTHER; note = 2'-O- methyl
  modified_base 21: mod_base = OTHER; note = 2'- fluoro
agaactggatgttgctgctga

SEQ ID NO: 296 - RNA, 21 nt, synthetic construct
  source 1..21: mol_type = other RNA
  modified_base 1: mod_base = OTHER; note = 2'- fluoro, 3'- thiophosphate
  modified_base 2: mod_base = OTHER; note = 2'-O- methyl, 3'- thiophosphate
  modified_base 3: mod_base = OTHER; note = 2'- fluoro
  modified_base 4: mod_base = OTHER; note = 2'-O- methyl
  modified_base 5: mod_base = OTHER; note = 2'- fluoro
  modified_base 6: mod_base = OTHER; note = 2'-O- methyl
  modified_base 7: mod_base = OTHER; note = 2'- fluoro
  modified_base 8: mod_base = OTHER; note = 2'-O- methyl
  modified_base 9: mod_base = OTHER; note = 2'- fluoro
  modified_base 10: mod_base = OTHER; note = 2'-O- methyl
  modified_base 11: mod_base = OTHER; note = 2'- fluoro
  modified_base 12: mod_base = OTHER; note = 2'-O- methyl
  modified_base 13: mod_base = OTHER; note = 2'- fluoro
  modified_base 14: mod_base = OTHER; note = 2'-O- methyl
  modified_base 15: mod_base = OTHER; note = 2'- fluoro
  modified_base 16: mod_base = OTHER; note = 2'-O- methyl
  modified_base 17: mod_base = OTHER; note = 2'- fluoro
  modified_base 18: mod_base = OTHER; note = 2'-O- methyl
  modified_base 19: mod_base = OTHER; note = 2'- fluoro
  modified_base 20: mod_base = OTHER; note = 2'-O- methyl
  modified_base 21: mod_base = OTHER; note = 2'- fluoro
aactggatgttgctgctgaga

SEQ ID NO: 297 - RNA, 21 nt, synthetic construct
  source 1..21: mol_type = other RNA
  modified_base 1: mod_base = OTHER; note = 2'- fluoro, 3'- thiophosphate
  modified_base 2: mod_base = OTHER; note = 2'-O- methyl, 3'- thiophosphate
  modified_base 3: mod_base = OTHER; note = 2'- fluoro
  modified_base 4: mod_base = OTHER; note = 2'-O- methyl
  modified_base 5: mod_base = OTHER; note = 2'- fluoro
  modified_base 6: mod_base = OTHER; note = 2'-O- methyl
  modified_base 7: mod_base = OTHER; note = 2'- fluoro
  modified_base 8: mod_base = OTHER; note = 2'-O- methyl
  modified_base 9: mod_base = OTHER; note = 2'- fluoro
  modified_base 10: mod_base = OTHER; note = 2'-O- methyl
  modified_base 11: mod_base = OTHER; note = 2'- fluoro
  modified_base 12: mod_base = OTHER; note = 2'-O- methyl
  modified_base 13: mod_base = OTHER; note = 2'- fluoro
  modified_base 14: mod_base = OTHER; note = 2'-O- methyl
  modified_base 15: mod_base = OTHER; note = 2'- fluoro
  modified_base 16: mod_base = OTHER; note = 2'-O- methyl
  modified_base 17: mod_base = OTHER; note = 2'- fluoro
  modified_base 18: mod_base = OTHER; note = 2'-O- methyl
  modified_base 19: mod_base = OTHER; note = 2'- fluoro
  modified_base 20: mod_base = OTHER; note = 2'-O- methyl
  modified_base 21: mod_base = OTHER; note = 2'- fluoro
actggatgttgctgctgagaa

SEQ ID NO: 298 - RNA, 21 nt, synthetic construct
  source 1..21: mol_type = other RNA
  modified_base 1: mod_base = OTHER; note = 2'- fluoro, 3'- thiophosphate
  modified_base 2: mod_base = OTHER; note = 2'-O- methyl, 3'- thiophosphate
  modified_base 3: mod_base = OTHER; note = 2'- fluoro
  modified_base 4: mod_base = OTHER; note = 2'-O- methyl
  modified_base 5: mod_base = OTHER; note = 2'- fluoro
  modified_base 6: mod_base = OTHER; note = 2'-O- methyl
  modified_base 7: mod_base = OTHER; note = 2'- fluoro
  modified_base 8: mod_base = OTHER; note = 2'-O- methyl
  modified_base 9: mod_base = OTHER; note = 2'- fluoro
  modified_base 10: mod_base = OTHER; note = 2'-O- methyl
  modified_base 11: mod_base = OTHER; note = 2'- fluoro
  modified_base 12: mod_base = OTHER; note = 2'-O- methyl
  modified_base 13: mod_base = OTHER; note = 2'- fluoro
  modified_base 14: mod_base = OTHER; note = 2'-O- methyl
  modified_base 15: mod_base = OTHER; note = 2'- fluoro
  modified_base 16: mod_base = OTHER; note = 2'-O- methyl
  modified_base 17: mod_base = OTHER; note = 2'- fluoro
  modified_base 18: mod_base = OTHER; note = 2'-O- methyl
  modified_base 19: mod_base = OTHER; note = 2'- fluoro
  modified_base 20: mod_base = OTHER; note = 2'-O- methyl
  modified_base 21: mod_base = OTHER; note = 2'- fluoro
tggatgttgctgctgagaaga

SEQ ID NO: 299 - RNA, 20 nt, synthetic construct
  source 1..20: mol_type = other RNA
  modified_base 1: mod_base = OTHER; note = 2'-O- methyl, 3'- thiophosphate
  modified_base 2: mod_base = OTHER; note = 2'- fluoro, 3'- thiophosphate
  modified_base 3: mod_base = OTHER; note = 2'-O- methyl
  modified_base 4: mod_base = OTHER; note = 2'- fluoro
  modified_base 5: mod_base = OTHER; note = 2'-O- methyl
  modified_base 6: mod_base = OTHER; note = 2'- fluoro
  modified_base 7: mod_base = OTHER; note = 2'-O- methyl
  modified_base 8: mod_base = OTHER; note = 2'- fluoro
  modified_base 9: mod_base = OTHER; note = 2'-O- methyl
  modified_base 10: mod_base = OTHER; note = 2'- fluoro
  modified_base 11: mod_base = OTHER; note = 2'-O- methyl
  modified_base 12: mod_base = OTHER; note = 2'- fluoro
  modified_base 13: mod_base = OTHER; note = 2'-O- methyl
  modified_base 14: mod_base = OTHER; note = 2'- fluoro
  modified_base 15: mod_base = OTHER; note = 2'-O- methyl
  modified_base 16: mod_base = OTHER; note = 2'- fluoro
  modified_base 17: mod_base = OTHER; note = 2'-O- methyl
  modified_base 18: mod_base = OTHER; note = 2'- fluoro
  modified_base 19: mod_base = OTHER; note = 2'-O- methyl
  modified_base 20: mod_base = OTHER; note = 2'- fluoro
tggatgttgctgctgagaaa

SEQ ID NO: 300 - RNA, 21 nt, synthetic construct
  source 1..21: mol_type = other RNA
  modified_base 1: mod_base = OTHER; note = 2'- fluoro, 3'- thiophosphate
  modified_base 2: mod_base = OTHER; note = 2'-O- methyl, 3'- thiophosphate
  modified_base 3: mod_base = OTHER; note = 2'- fluoro
  modified_base 4: mod_base = OTHER; note = 2'-O- methyl
  modified_base 5: mod_base = OTHER; note = 2'- fluoro
  modified_base 6: mod_base = OTHER; note = 2'-O- methyl
  modified_base 7: mod_base = OTHER; note = 2'- fluoro
  modified_base 8: mod_base = OTHER; note = 2'-O- methyl
  modified_base 9: mod_base = OTHER; note = 2'- fluoro
  modified_base 10: mod_base = OTHER; note = 2'-O- methyl
  modified_base 11: mod_base = OTHER; note = 2'- fluoro
  modified_base 12: mod_base = OTHER; note = 2'-O- methyl
  modified_base 13: mod_base = OTHER; note = 2'- fluoro
  modified_base 14: mod_base = OTHER; note = 2'-O- methyl
  modified_base 15: mod_base = OTHER; note = 2'- fluoro
  modified_base 16: mod_base = OTHER; note = 2'-O- methyl
  modified_base 17: mod_base = OTHER; note = 2'- fluoro
  modified_base 18: mod_base = OTHER; note = 2'-O- methyl
  modified_base 19: mod_base = OTHER; note = 2'- fluoro
  modified_base 20: mod_base = OTHER; note = 2'-O- methyl
  modified_base 21: mod_base = OTHER; note = 2'- fluoro
gatgttgctgctgagaagatt

SEQ ID NO: 301 - RNA, 21 nt, synthetic construct
  source 1..21: mol_type = other RNA
  modified_base 1: mod_base = OTHER; note = 2'- fluoro, 3'- thiophosphate
  modified_base 2: mod_base = OTHER; note = 2'-O- methyl, 3'- thiophosphate
  modified_base 3: mod_base = OTHER; note = 2'- fluoro
  modified_base 4: mod_base = OTHER; note = 2'-O- methyl
  modified_base 5: mod_base = OTHER; note = 2'- fluoro
  modified_base 6: mod_base = OTHER; note = 2'-O- methyl
  modified_base 7: mod_base = OTHER; note = 2'- fluoro
  modified_base 8: mod_base = OTHER; note = 2'-O- methyl
  modified_base 9: mod_base = OTHER; note = 2'- fluoro
  modified_base 10: mod_base = OTHER; note = 2'-O- methyl
  modified_base 11: mod_base = OTHER; note = 2'- fluoro
  modified_base 12: mod_base = OTHER; note = 2'-O- methyl
  modified_base 13: mod_base = OTHER; note = 2'- fluoro
  modified_base 14: mod_base = OTHER; note = 2'-O- methyl
  modified_base 15: mod_base = OTHER; note = 2'- fluoro
  modified_base 16: mod_base = OTHER; note = 2'-O- methyl
  modified_base 17: mod_base = OTHER; note = 2'- fluoro
  modified_base 18: mod_base = OTHER; note = 2'-O- methyl
  modified_base 19: mod_base = OTHER; note = 2'- fluoro
  modified_base 20: mod_base = OTHER; note = 2'-O- methyl
  modified_base 21: mod_base = OTHER; note = 2'- fluoro
ctgctgagaagattgacaggt

SEQ ID NO: 302 - RNA, 20 nt, synthetic construct
  source 1..20: mol_type = other RNA
  modified_base 1: mod_base = OTHER; note = 2'-O- methyl, 3'- thiophosphate
  modified_base 2: mod_base = OTHER; note = 2'- fluoro, 3'- thiophosphate
  modified_base 3: mod_base = OTHER; note = 2'-O- methyl
  modified_base 4: mod_base = OTHER; note = 2'- fluoro
  modified_base 5: mod_base = OTHER; note = 2'-O- methyl
  modified_base 6: mod_base = OTHER; note = 2'- fluoro
  modified_base 7: mod_base = OTHER; note = 2'-O- methyl
  modified_base 8: mod_base = OTHER; note = 2'- fluoro
  modified_base 9: mod_base = OTHER; note = 2'-O- methyl
  modified_base 10: mod_base = OTHER; note = 2'- fluoro
  modified_base 11: mod_base = OTHER; note = 2'-O- methyl
  modified_base 12: mod_base = OTHER; note = 2'- fluoro
  modified_base 13: mod_base = OTHER; note = 2'-O- methyl
  modified_base 14: mod_base = OTHER; note = 2'- fluoro
  modified_base 15: mod_base = OTHER; note = 2'-O- methyl
  modified_base 16: mod_base = OTHER; note = 2'- fluoro
  modified_base 17: mod_base = OTHER; note = 2'-O- methyl
  modified_base 18: mod_base = OTHER; note = 2'- fluoro
  modified_base 19: mod_base = OTHER; note = 2'-O- methyl
  modified_base 20: mod_base = OTHER; note = 2'- fluoro
gattgacaggttcatgcaga

SEQ ID NO: 303 - RNA, 21 nt, synthetic construct
  source 1..21: mol_type = other RNA
  modified_base 1: mod_base = OTHER; note = 2'- fluoro, 3'- thiophosphate
  modified_base 2: mod_base = OTHER; note = 2'-O- methyl, 3'- thiophosphate
  modified_base 3: mod_base = OTHER; note = 2'- fluoro
  modified_base 4: mod_base = OTHER; note = 2'-O- methyl
  modified_base 5: mod_base = OTHER; note = 2'- fluoro
  modified_base 6: mod_base = OTHER; note = 2'-O- methyl
  modified_base 7: mod_base = OTHER; note = 2'- fluoro
  modified_base 8: mod_base = OTHER; note = 2'-O- methyl
  modified_base 9: mod_base = OTHER; note = 2'- fluoro
  modified_base 10: mod_base = OTHER; note = 2'-O- methyl
  modified_base 11: mod_base = OTHER; note = 2'- fluoro
  modified_base 12: mod_base = OTHER; note = 2'-O- methyl
  modified_base 13: mod_base = OTHER; note = 2'- fluoro
  modified_base 14: mod_base = OTHER; note = 2'-O- methyl
  modified_base 15: mod_base = OTHER; note = 2'- fluoro
  modified_base 16: mod_base = OTHER; note = 2'-O- methyl
  modified_base 17: mod_base = OTHER; note = 2'- fluoro
  modified_base 18: mod_base = OTHER; note = 2'-O- methyl
  modified_base 19: mod_base = OTHER; note = 2'- fluoro
  modified_base 20: mod_base = OTHER; note = 2'-O- methyl
  modified_base 21: mod_base = OTHER; note = 2'- fluoro
gcactggagtgacatccagga

SEQ ID NO: 304 - RNA, 21 nt, synthetic construct
  source 1..21: mol_type = other RNA
  modified_base 1: mod_base = OTHER; note = 2'- fluoro, 3'- thiophosphate
  modified_base 2: mod_base = OTHER; note = 2'-O- methyl, 3'- thiophosphate
  modified_base 3: mod_base = OTHER; note = 2'- fluoro
  modified_base 4: mod_base = OTHER; note = 2'-O- methyl
  modified_base 5: mod_base = OTHER; note = 2'- fluoro
  modified_base 6: mod_base = OTHER; note = 2'-O- methyl
  modified_base 7: mod_base = OTHER; note = 2'- fluoro
  modified_base 8: mod_base = OTHER; note = 2'-O- methyl
  modified_base 9: mod_base = OTHER; note = 2'- fluoro
  modified_base 10: mod_base = OTHER; note = 2'-O- methyl
  modified_base 11: mod_base = OTHER; note = 2'- fluoro
  modified_base 12: mod_base = OTHER; note = 2'-O- methyl
  modified_base 13: mod_base = OTHER; note = 2'- fluoro
  modified_base 14: mod_base = OTHER; note = 2'-O- methyl
  modified_base 15: mod_base = OTHER; note = 2'- fluoro
  modified_base 16: mod_base = OTHER; note = 2'-O- methyl
  modified_base 17: mod_base = OTHER; note = 2'- fluoro
  modified_base 18: mod_base = OTHER; note = 2'-O- methyl
  modified_base 19: mod_base = OTHER; note = 2'- fluoro
  modified_base 20: mod_base = OTHER; note = 2'-O- methyl
  modified_base 21: mod_base = OTHER; note = 2'- fluoro
ctggagtgacatccaggacaa

SEQ ID NO: 305 - RNA, 21 nt, synthetic construct
  source 1..21: mol_type = other RNA
  modified_base 1: mod_base = OTHER; note = 2'- fluoro, 3'- thiophosphate
  modified_base 2: mod_base = OTHER; note = 2'-O- methyl, 3'- thiophosphate
  modified_base 3: mod_base = OTHER; note = 2'- fluoro
  modified_base 4: mod_base = OTHER; note = 2'-O- methyl
  modified_base 5: mod_base = OTHER; note = 2'- fluoro
  modified_base 6: mod_base = OTHER; note = 2'-O- methyl
  modified_base 7: mod_base = OTHER; note = 2'- fluoro
  modified_base 8: mod_base = OTHER; note = 2'-O- methyl
  modified_base 9: mod_base = OTHER; note = 2'- fluoro
  modified_base 10: mod_base = OTHER; note = 2'-O- methyl
  modified_base 11: mod_base = OTHER; note = 2'- fluoro
  modified_base 12: mod_base = OTHER; note = 2'-O- methyl
  modified_base 13: mod_base = OTHER; note = 2'- fluoro
  modified_base 14: mod_base = OTHER; note = 2'-O- methyl
  modified_base 15: mod_base = OTHER; note = 2'- fluoro
  modified_base 16: mod_base = OTHER; note = 2'-O- methyl
  modified_base 17: mod_base = OTHER; note = 2'- fluoro
  modified_base 18: mod_base = OTHER; note = 2'-O- methyl
  modified_base 19: mod_base = OTHER; note = 2'- fluoro
  modified_base 20: mod_base = OTHER; note = 2'-O- methyl
  modified_base 21: mod_base = OTHER; note = 2'- fluoro
gagtgacatccaggacaactt

SEQ ID NO: 306 - RNA, 21 nt, synthetic construct
  source 1..21: mol_type = other RNA
  modified_base 1: mod_base = OTHER; note = 2'- fluoro, 3'- thiophosphate
  modified_base 2: mod_base = OTHER; note = 2'-O- methyl, 3'- thiophosphate
  modified_base 3: mod_base = OTHER; note = 2'- fluoro
  modified_base 4: mod_base = OTHER; note = 2'-O- methyl
  modified_base 5: mod_base = OTHER; note = 2'- fluoro
  modified_base 6: mod_base = OTHER; note = 2'-O- methyl
  modified_base 7: mod_base = OTHER; note = 2'- fluoro
  modified_base 8: mod_base = OTHER; note = 2'-O- methyl
  modified_base 9: mod_base = OTHER; note = 2'- fluoro
  modified_base 10: mod_base = OTHER; note = 2'-O- methyl
  modified_base 11: mod_base = OTHER; note = 2'- fluoro
  modified_base 12: mod_base = OTHER; note = 2'-O- methyl
  modified_base 13: mod_base = OTHER; note = 2'- fluoro
  modified_base 14: mod_base = OTHER; note = 2'-O- methyl
  modified_base 15: mod_base = OTHER; note = 2'- fluoro
  modified_base 16: mod_base = OTHER; note = 2'-O- methyl
  modified_base 17: mod_base = OTHER; note = 2'- fluoro
  modified_base 18: mod_base = OTHER; note = 2'-O- methyl
  modified_base 19: mod_base = OTHER; note = 2'- fluoro
  modified_base 20: mod_base = OTHER; note = 2'-O- methyl
  modified_base 21: mod_base = OTHER; note = 2'- fluoro
gtgacatccaggacaacttct

SEQ ID NO: 307 - RNA, 21 nt, synthetic construct
  source 1..21: mol_type = other RNA
  modified_base 1: mod_base = OTHER; note = 2'- fluoro, 3'- thiophosphate
  modified_base 2: mod_base = OTHER; note = 2'-O- methyl, 3'- thiophosphate
  modified_base 3: mod_base = OTHER; note = 2'- fluoro
  modified_base 4: mod_base = OTHER; note = 2'-O- methyl
  modified_base 5: mod_base = OTHER; note = 2'- fluoro
  modified_base 6: mod_base = OTHER; note = 2'-O- methyl
  modified_base 7: mod_base = OTHER; note = 2'- fluoro
  modified_base 8: mod_base = OTHER; note = 2'-O- methyl
  modified_base 9: mod_base = OTHER; note = 2'- fluoro
  modified_base 10: mod_base = OTHER; note = 2'-O- methyl
  modified_base 11: mod_base = OTHER; note = 2'- fluoro
  modified_base 12: mod_base = OTHER; note = 2'-O- methyl
  modified_base 13: mod_base = OTHER; note = 2'- fluoro
  modified_base 14: mod_base = OTHER; note = 2'-O- methyl
  modified_base 15: mod_base = OTHER; note = 2'- fluoro
  modified_base 16: mod_base = OTHER; note = 2'-O- methyl
  modified_base 17: mod_base = OTHER; note = 2'- fluoro
  modified_base 18: mod_base = OTHER; note = 2'-O- methyl
  modified_base 19: mod_base = OTHER; note = 2'- fluoro
  modified_base 20: mod_base = OTHER; note = 2'-O- methyl
  modified_base 21: mod_base = OTHER; note = 2'- fluoro
gacaacttctcggtgactcaa

SEQ ID NO: 308 - RNA, 21 nt, synthetic construct
  source 1..21: mol_type = other RNA
  modified_base 1: mod_base = OTHER; note = 2'- fluoro, 3'- thiophosphate
  modified_base 2: mod_base = OTHER; note = 2'-O- methyl, 3'- thiophosphate
  modified_base 3: mod_base = OTHER; note = 2'- fluoro
  modified_base 4: mod_base = OTHER; note = 2'-O- methyl
  modified_base 5: mod_base = OTHER; note = 2'- fluoro
  modified_base 6: mod_base = OTHER; note = 2'-O- methyl
  modified_base 7: mod_base = OTHER; note = 2'- fluoro
  modified_base 8: mod_base = OTHER; note = 2'-O- methyl
  modified_base 9: mod_base = OTHER; note = 2'- fluoro
  modified_base 10: mod_base = OTHER; note = 2'-O- methyl
  modified_base 11: mod_base = OTHER; note = 2'- fluoro
  modified_base 12: mod_base = OTHER; note = 2'-O- methyl
  modified_base 13: mod_base = OTHER; note = 2'- fluoro
  modified_base 14: mod_base = OTHER; note = 2'-O- methyl
  modified_base 15: mod_base = OTHER; note = 2'- fluoro
  modified_base 16: mod_base = OTHER; note = 2'-O- methyl
  modified_base 17: mod_base = OTHER; note = 2'- fluoro
  modified_base 18: mod_base = OTHER; note = 2'-O- methyl
  modified_base 19: mod_base = OTHER; note = 2'- fluoro
  modified_base 20: mod_base = OTHER; note = 2'-O- methyl
  modified_base 21: mod_base = OTHER; note = 2'- fluoro
caacttctcggtgactcaagt

SEQ ID NO: 309 - RNA, 21 nt, synthetic construct
  source 1..21: mol_type = other RNA
  modified_base 1: mod_base = OTHER; note = 2'- fluoro, 3'- thiophosphate
  modified_base 2: mod_base = OTHER; note = 2'-O- methyl, 3'- thiophosphate
  modified_base 3: mod_base = OTHER; note = 2'- fluoro
  modified_base 4: mod_base = OTHER; note = 2'-O- methyl
  modified_base 5: mod_base = OTHER; note = 2'- fluoro
  modified_base 6: mod_base = OTHER; note = 2'-O- methyl
  modified_base 7: mod_base = OTHER; note = 2'- fluoro
  modified_base 8: mod_base = OTHER; note = 2'-O- methyl
  modified_base 9: mod_base = OTHER; note = 2'- fluoro
  modified_base 10: mod_base = OTHER; note = 2'-O- methyl
  modified_base 11: mod_base = OTHER; note = 2'- fluoro
  modified_base 12: mod_base = OTHER; note = 2'-O- methyl
  modified_base 13: mod_base = OTHER; note = 2'- fluoro
  modified_base 14: mod_base = OTHER; note = 2'-O- methyl
  modified_base 15: mod_base = OTHER; note = 2'- fluoro
  modified_base 16: mod_base = OTHER; note = 2'-O- methyl
  modified_base 17: mod_base = OTHER; note = 2'- fluoro
  modified_base 18: mod_base = OTHER; note = 2'-O- methyl
  modified_base 19: mod_base = OTHER; note = 2'- fluoro
  modified_base 20: mod_base = OTHER; note = 2'-O- methyl
  modified_base 21: mod_base = OTHER; note = 2'- fluoro
cggtgactcaagtgcccttca

SEQ ID NO: 310 - RNA, 21 nt, synthetic construct
  source 1..21: mol_type = other RNA
  modified_base 1: mod_base = OTHER; note = 2'- fluoro, 3'- thiophosphate
  modified_base 2: mod_base = OTHER; note = 2'-O- methyl, 3'- thiophosphate
  modified_base 3: mod_base = OTHER; note = 2'- fluoro
  modified_base 4: mod_base = OTHER; note = 2'-O- methyl
  modified_base 5: mod_base = OTHER; note = 2'- fluoro
  modified_base 6: mod_base = OTHER; note = 2'-O- methyl
  modified_base 7: mod_base = OTHER; note = 2'- fluoro
  modified_base 8: mod_base = OTHER; note = 2'-O- methyl
  modified_base 9: mod_base = OTHER; note = 2'- fluoro
  modified_base 10: mod_base = OTHER; note = 2'-O- methyl
  modified_base 11: mod_base = OTHER; note = 2'- fluoro
  modified_base 12: mod_base = OTHER; note = 2'-O- methyl
  modified_base 13: mod_base = OTHER; note = 2'- fluoro
  modified_base 14: mod_base = OTHER; note = 2'-O- methyl
  modified_base 15: mod_base = OTHER; note = 2'- fluoro
  modified_base 16: mod_base = OTHER; note = 2'-O- methyl
  modified_base 17: mod_base = OTHER; note = 2'- fluoro
  modified_base 18: mod_base = OTHER; note = 2'-O- methyl
  modified_base 19: mod_base = OTHER; note = 2'- fluoro
  modified_base 20: mod_base = OTHER; note = 2'-O- methyl
  modified_base 21: mod_base = OTHER; note = 2'- fluoro
gtgactcaagtgcccttcact

SEQ ID NO: 311 - RNA, 23 nt, synthetic construct
  source 1..23: mol_type = other RNA
  modified_base 1: mod_base = OTHER; note = 2'-O- methyl, 3'- thiophosphate
  modified_base 2: mod_base = OTHER; note = 2'- fluoro, 3'- thiophosphate
  modified_base 3: mod_base = OTHER; note = 2'-O- methyl
  modified_base 4: mod_base = OTHER; note = 2'- fluoro
  modified_base 5: mod_base = OTHER; note = 2'-O- methyl
  modified_base 6: mod_base = OTHER; note = 2'- fluoro
  modified_base 7: mod_base = OTHER; note = 2'-O- methyl
  modified_base 8: mod_base = OTHER; note = 2'- fluoro
  modified_base 9: mod_base = OTHER; note = 2'-O- methyl
  modified_base 10: mod_base = OTHER; note = 2'- fluoro
  modified_base 11: mod_base = OTHER; note = 2'-O- methyl
  modified_base 12: mod_base = OTHER; note = 2'- fluoro
  modified_base 13: mod_base = OTHER; note = 2'-O- methyl
  modified_base 14: mod_base = OTHER; note = 2'- fluoro
  modified_base 15: mod_base = OTHER; note = 2'-O- methyl
  modified_base 16: mod_base = OTHER; note = 2'- fluoro
  modified_base 17: mod_base = OTHER; note = 2'-O- methyl
  modified_base 18: mod_base = OTHER; note = 2'- fluoro
  modified_base 19: mod_base = OTHER; note = 2'-O- methyl
  modified_base 20: mod_base = OTHER; note = 2'- fluoro
  modified_base 21: mod_base = OTHER; note = 2'-O- methyl, 3'- thiophosphate
  modified_base 22: mod_base = OTHER; note = 2'- fluoro, 3'- thiophosphate
  modified_base 23: mod_base = OTHER; note = 2'-O- methyl
aggcaggcgctctcagtgaaggg

SEQ ID NO: 312 - RNA, 23 nt, synthetic construct
  source 1..23: mol_type = other RNA
  modified_base 1: mod_base = OTHER; note = 2'-O- methyl, 3'- thiophosphate
  modified_base 2: mod_base = OTHER; note = 2'- fluoro, 3'- thiophosphate
  modified_base 3: mod_base = OTHER; note = 2'-O- methyl
  modified_base 4: mod_base = OTHER; note = 2'- fluoro
  modified_base 5: mod_base = OTHER; note = 2'-O- methyl
  modified_base 6: mod_base = OTHER; note = 2'- fluoro
  modified_base 7: mod_base = OTHER; note = 2'-O- methyl
  modified_base 8: mod_base = OTHER; note = 2'- fluoro
  modified_base 9: mod_base = OTHER; note = 2'-O- methyl
  modified_base 10: mod_base = OTHER; note = 2'- fluoro
  modified_base 11: mod_base = OTHER; note = 2'-O- methyl
  modified_base 12: mod_base = OTHER; note = 2'- fluoro
  modified_base 13: mod_base = OTHER; note = 2'-O- methyl
  modified_base 14: mod_base = OTHER; note = 2'- fluoro
  modified_base 15: mod_base = OTHER; note = 2'-O- methyl
  modified_base 16: mod_base = OTHER; note = 2'- fluoro
  modified_base 17: mod_base = OTHER; note = 2'-O- methyl
  modified_base 18: mod_base = OTHER; note = 2'- fluoro
  modified_base 19: mod_base = OTHER; note = 2'-O- methyl
  modified_base 20: mod_base = OTHER; note = 2'- fluoro
  modified_base 21: mod_base = OTHER; note = 2'-O- methyl, 3'- thiophosphate
  modified_base 22: mod_base = OTHER; note = 2'- fluoro, 3'- thiophosphate
  modified_base 23: mod_base = OTHER; note = 2'-O- methyl
agcaggcaggcgctctcagtgaa

SEQ ID NO: 313 - RNA, 23 nt, synthetic construct
  source 1..23: mol_type = other RNA
  modified_base 1: mod_base = OTHER; note = 2'-O- methyl, 3'- thiophosphate
  modified_base 2: mod_base = OTHER; note = 2'- fluoro, 3'- thiophosphate
  modified_base 3: mod_base = OTHER; note = 2'-O- methyl
  modified_base 4: mod_base = OTHER; note = 2'- fluoro
  modified_base 5: mod_base = OTHER; note = 2'-O- methyl
  modified_base 6: mod_base = OTHER; note = 2'- fluoro
  modified_base 7: mod_base = OTHER; note = 2'-O- methyl
  modified_base 8: mod_base = OTHER; note = 2'- fluoro
  modified_base 9: mod_base = OTHER; note = 2'-O- methyl
  modified_base 10: mod_base = OTHER; note = 2'- fluoro
  modified_base 11: mod_base = OTHER; note = 2'-O- methyl
  modified_base 12: mod_base = OTHER; note = 2'- fluoro
  modified_base 13: mod_base = OTHER; note = 2'-O- methyl
  modified_base 14: mod_base = OTHER; note = 2'- fluoro
  modified_base 15: mod_base = OTHER; note = 2'-O- methyl
  modified_base 16: mod_base = OTHER; note = 2'- fluoro
  modified_base 17: mod_base = OTHER; note = 2'-O- methyl
  modified_base 18: mod_base = OTHER; note = 2'- fluoro
  modified_base 19: mod_base = OTHER; note = 2'-O- methyl
  modified_base 20: mod_base = OTHER; note = 2'- fluoro
  modified_base 21: mod_base = OTHER; note = 2'-O- methyl, 3'- thiophosphate
  modified_base 22: mod_base = OTHER; note = 2'- fluoro, 3'- thiophosphate
  modified_base 23: mod_base = OTHER; note = 2'-O- methyl
agcagcaggcaggcgctctcagt

SEQ ID NO: 314 - RNA, 23 nt, synthetic construct
  source 1..23: mol_type = other RNA
  modified_base 1: mod_base = OTHER; note = 2'-O- methyl, 3'- thiophosphate
  modified_base 2: mod_base = OTHER; note = 2'- fluoro, 3'- thiophosphate
  modified_base 3: mod_base = OTHER; note = 2'-O- methyl
  modified_base 4: mod_base = OTHER; note = 2'- fluoro
  modified_base 5: mod_base = OTHER; note = 2'-O- methyl
  modified_base 6: mod_base = OTHER; note = 2'- fluoro
  modified_base 7: mod_base = OTHER; note = 2'-O- methyl
  modified_base 8: mod_base = OTHER; note = 2'- fluoro
  modified_base 9: mod_base = OTHER; note = 2'-O- methyl
  modified_base 10: mod_base = OTHER; note = 2'- fluoro
  modified_base 11: mod_base = OTHER; note = 2'-O- methyl
  modified_base 12: mod_base = OTHER; note = 2'- fluoro
  modified_base 13: mod_base = OTHER; note = 2'-O- methyl
  modified_base 14: mod_base = OTHER; note = 2'- fluoro
  modified_base 15: mod_base = OTHER; note = 2'-O- methyl
  modified_base 16: mod_base = OTHER; note = 2'- fluoro
  modified_base 17: mod_base = OTHER; note = 2'-O- methyl
  modified_base 18: mod_base = OTHER; note = 2'- fluoro
  modified_base 19: mod_base = OTHER; note = 2'-O- methyl
  modified_base 20: mod_base = OTHER; note = 2'- fluoro
  modified_base 21: mod_base = OTHER; note = 2'-O- methyl, 3'- thiophosphate
  modified_base 22: mod_base = OTHER; note = 2'- fluoro, 3'- thiophosphate
  modified_base 23: mod_base = OTHER; note = 2'-O- methyl
tcagcagcaggcaggcgctctca

SEQ ID NO: 315 - RNA, 23 nt, synthetic construct
  source 1..23: mol_type = other RNA
  modified_base 1: mod_base = OTHER; note = 2'-O- methyl, 3'- thiophosphate
  modified_base 2: mod_base = OTHER; note = 2'- fluoro, 3'- thiophosphate
  modified_base 3: mod_base = OTHER; note = 2'-O- methyl
  modified_base 4: mod_base = OTHER; note = 2'- fluoro
  modified_base 5: mod_base = OTHER; note = 2'-O- methyl
  modified_base 6: mod_base = OTHER; note = 2'- fluoro
  modified_base 7: mod_base = OTHER; note = 2'-O- methyl
  modified_base 8: mod_base = OTHER; note = 2'- fluoro
  modified_base 9: mod_base = OTHER; note = 2'-O- methyl
  modified_base 10: mod_base = OTHER; note = 2'- fluoro
  modified_base 11: mod_base = OTHER; note = 2'-O- methyl
  modified_base 12: mod_base = OTHER; note = 2'- fluoro
  modified_base 13: mod_base = OTHER; note = 2'-O- methyl
  modified_base 14: mod_base = OTHER; note = 2'- fluoro
  modified_base 15: mod_base = OTHER; note = 2'-O- methyl
  modified_base 16: mod_base = OTHER; note = 2'- fluoro
  modified_base 17: mod_base = OTHER; note = 2'-O- methyl
  modified_base 18: mod_base = OTHER; note = 2'- fluoro
  modified_base 19: mod_base = OTHER; note = 2'-O- methyl
  modified_base 20: mod_base = OTHER; note = 2'- fluoro
  modified_base 21: mod_base = OTHER; note = 2'-O- methyl, 3'- thiophosphate
  modified_base 22: mod_base = OTHER; note = 2'- fluoro, 3'- thiophosphate
  modified_base 23: mod_base = OTHER; note = 2'-O- methyl
atcagcagcaggcaggcgctctc

SEQ ID NO: 316 - RNA, 23 nt, synthetic construct
  source 1..23: mol_type = other RNA
  modified_base 1: mod_base = OTHER; note = 2'-O- methyl, 3'- thiophosphate
  modified_base 2: mod_base = OTHER; note = 2'- fluoro, 3'- thiophosphate
  modified_base 3: mod_base = OTHER; note = 2'-O- methyl
  modified_base 4: mod_base = OTHER; note = 2'- fluoro
  modified_base 5: mod_base = OTHER; note = 2'-O- methyl
  modified_base 6: mod_base = OTHER; note = 2'- fluoro
  modified_base 7: mod_base = OTHER; note = 2'-O- methyl
  modified_base 8: mod_base = OTHER; note = 2'- fluoro
  modified_base 9: mod_base = OTHER; note = 2'-O- methyl
  modified_base 10: mod_base = OTHER; note = 2'- fluoro
  modified_base 11: mod_base = OTHER; note = 2'-O- methyl
  modified_base 12: mod_base = OTHER; note = 2'- fluoro
  modified_base 13: mod_base = OTHER; note = 2'-O- methyl
  modified_base 14: mod_base = OTHER; note = 2'- fluoro
  modified_base 15: mod_base = OTHER; note = 2'-O- methyl
  modified_base 16: mod_base = OTHER; note = 2'- fluoro
  modified_base 17: mod_base = OTHER; note = 2'-O- methyl
  modified_base 18: mod_base = OTHER; note = 2'- fluoro
  modified_base 19: mod_base = OTHER; note = 2'-O- methyl
  modified_base 20: mod_base = OTHER; note = 2'- fluoro
  modified_base 21: mod_base = OTHER; note = 2'-O- methyl, 3'- thiophosphate
  modified_base 22: mod_base = OTHER; note = 2'- fluoro, 3'- thiophosphate
  modified_base 23: mod_base = OTHER; note = 2'-O- methyl
tggatcagcagcaggcaggcgct

SEQ ID NO: 317 - RNA, 23 nt, synthetic construct
  source 1..23: mol_type = other RNA
  modified_base 1: mod_base = OTHER; note = 2'-O- methyl, 3'- thiophosphate
  modified_base 2: mod_base = OTHER; note = 2'- fluoro, 3'- thiophosphate
  modified_base 3: mod_base = OTHER; note = 2'-O- methyl
  modified_base 4: mod_base = OTHER; note = 2'- fluoro
  modified_base 5: mod_base = OTHER; note = 2'-O- methyl
  modified_base 6: mod_base = OTHER; note = 2'- fluoro
  modified_base 7: mod_base = OTHER; note = 2'-O- methyl
  modified_base 8: mod_base = OTHER; note = 2'- fluoro
  modified_base 9: mod_base = OTHER; note = 2'-O- methyl
  modified_base 10: mod_base = OTHER; note = 2'- fluoro
  modified_base 11: mod_base = OTHER; note = 2'-O- methyl
  modified_base 12: mod_base = OTHER; note = 2'- fluoro
  modified_base 13: mod_base = OTHER; note = 2'-O- methyl
  modified_base 14: mod_base = OTHER; note = 2'- fluoro
  modified_base 15: mod_base = OTHER; note = 2'-O- methyl
  modified_base 16: mod_base = OTHER; note = 2'- fluoro
  modified_base 17: mod_base = OTHER; note = 2'-O- methyl
  modified_base 18: mod_base = OTHER; note = 2'- fluoro
  modified_base 19: mod_base = OTHER; note = 2'-O- methyl
  modified_base 20: mod_base = OTHER; note = 2'- fluoro
  modified_base 21: mod_base = OTHER; note = 2'-O- methyl, 3'- thiophosphate
  modified_base 22: mod_base = OTHER; note = 2'- fluoro, 3'- thiophosphate
  modified_base 23: mod_base = OTHER; note = 2'-O- methyl
aggctggatcagcagcaggcagg

SEQ ID NO: 318 - RNA, 23 nt, synthetic construct
  source 1..23: mol_type = other RNA
  modified_base 1: mod_base = OTHER; note = 2'-O- methyl, 3'- thiophosphate
  modified_base 2: mod_base = OTHER; note = 2'- fluoro, 3'- thiophosphate
  modified_base 3: mod_base = OTHER; note = 2'-O- methyl
  modified_base 4: mod_base = OTHER; note = 2'- fluoro
  modified_base 5: mod_base = OTHER; note = 2'-O- methyl
  modified_base 6: mod_base = OTHER; note = 2'- fluoro
  modified_base 7: mod_base = OTHER; note = 2'-O- methyl
  modified_base 8: mod_base = OTHER; note = 2'- fluoro
  modified_base 9: mod_base = OTHER; note = 2'-O- methyl
  modified_base 10: mod_base = OTHER; note = 2'- fluoro
  modified_base 11: mod_base = OTHER; note = 2'-O- methyl
  modified_base 12: mod_base = OTHER; note = 2'- fluoro
  modified_base 13: mod_base = OTHER; note = 2'-O- methyl
  modified_base 14: mod_base = OTHER; note = 2'- fluoro
  modified_base 15: mod_base = OTHER; note = 2'-O- methyl
  modified_base 16: mod_base = OTHER; note = 2'- fluoro
  modified_base 17: mod_base = OTHER; note = 2'-O- methyl
  modified_base 18: mod_base = OTHER; note = 2'- fluoro
  modified_base 19: mod_base = OTHER; note = 2'-O- methyl
  modified_base 20: mod_base = OTHER; note = 2'- fluoro
  modified_base 21: mod_base = OTHER; note = 2'-O- methyl, 3'- thiophosphate
  modified_base 22: mod_base = OTHER; note = 2'- fluoro, 3'- thiophosphate
  modified_base 23: mod_base = OTHER; note = 2'-O- methyl
tgaggctggatcagcagcaggca

SEQ ID NO: 319 - RNA, 23 nt, synthetic construct
  source 1..23: mol_type = other RNA
  modified_base 1: mod_base = OTHER; note = 2'-O- methyl, 3'- thiophosphate
  modified_base 2: mod_base = OTHER; note = 2'- fluoro, 3'- thiophosphate
  modified_base 3: mod_base = OTHER; note = 2'-O- methyl
  modified_base 4: mod_base = OTHER; note = 2'- fluoro
  modified_base 5: mod_base = OTHER; note = 2'-O- methyl
  modified_base 6: mod_base = OTHER; note = 2'- fluoro
  modified_base 7: mod_base = OTHER; note = 2'-O- methyl
  modified_base 8: mod_base = OTHER; note = 2'- fluoro
  modified_base 9: mod_base = OTHER; note = 2'-O- methyl
  modified_base 10: mod_base = OTHER; note = 2'- fluoro
  modified_base 11: mod_base = OTHER; note = 2'-O- methyl
  modified_base 12: mod_base = OTHER; note = 2'- fluoro
  modified_base 13: mod_base = OTHER; note = 2'-O- methyl
  modified_base 14: mod_base = OTHER; note = 2'- fluoro
  modified_base 15: mod_base = OTHER; note = 2'-O- methyl
  modified_base 16: mod_base = OTHER; note = 2'- fluoro
  modified_base 17: mod_base = OTHER; note = 2'-O- methyl
  modified_base 18: mod_base = OTHER; note = 2'- fluoro
  modified_base 19: mod_base = OTHER; note = 2'-O- methyl
  modified_base 20: mod_base = OTHER; note = 2'- fluoro
  modified_base 21: mod_base = OTHER; note = 2'-O- methyl, 3'- thiophosphate
  modified_base 22: mod_base = OTHER; note = 2'- fluoro, 3'- thiophosphate
  modified_base 23: mod_base = OTHER; note = 2'-O- methyl
agtgaggctggatcagcagcagg

SEQ ID NO: 320 - RNA, 23 nt, synthetic construct
  source 1..23: mol_type = other RNA
  modified_base 1: mod_base = OTHER; note = 2'-O- methyl, 3'- thiophosphate
  modified_base 2: mod_base = OTHER; note = 2'- fluoro, 3'- thiophosphate
  modified_base 3: mod_base = OTHER; note = 2'-O- methyl
  modified_base 4: mod_base = OTHER; note = 2'- fluoro
  modified_base 5: mod_base = OTHER; note = 2'-O- methyl
  modified_base 6: mod_base = OTHER; note = 2'- fluoro
  modified_base 7: mod_base = OTHER; note = 2'-O- methyl
  modified_base 8: mod_base = OTHER; note = 2'- fluoro
  modified_base 9: mod_base = OTHER; note = 2'-O- methyl
  modified_base 10: mod_base = OTHER; note = 2'- fluoro
  modified_base 11: mod_base = OTHER; note = 2'-O- methyl
  modified_base 12: mod_base = OTHER; note = 2'- fluoro
  modified_base 13: mod_base = OTHER; note = 2'-O- methyl
  modified_base 14: mod_base = OTHER; note = 2'- fluoro
  modified_base 15: mod_base = OTHER; note = 2'-O- methyl
  modified_base 16: mod_base = OTHER; note = 2'- fluoro
  modified_base 17: mod_base = OTHER; note = 2'-O- methyl
  modified_base 18: mod_base = OTHER; note = 2'- fluoro
  modified_base 19: mod_base = OTHER; note = 2'-O- methyl
  modified_base 20: mod_base = OTHER; note = 2'- fluoro
  modified_base 21: mod_base = OTHER; note = 2'-O- methyl, 3'- thiophosphate
  modified_base 22: mod_base = OTHER; note = 2'- fluoro, 3'- thiophosphate
  modified_base 23: mod_base = OTHER; note = 2'-O- methyl
tagtgaggctggatcagcagcag

SEQ ID NO: 321 - RNA, 23 nt, synthetic construct
  source 1..23: mol_type = other RNA
  modified_base 1: mod_base = OTHER; note = 2'-O- methyl, 3'- thiophosphate
  modified_base 2: mod_base = OTHER; note = 2'- fluoro, 3'- thiophosphate
  modified_base 3: mod_base = OTHER; note = 2'-O- methyl
  modified_base 4: mod_base = OTHER; note = 2'- fluoro
  modified_base 5: mod_base = OTHER; note = 2'-O- methyl
  modified_base 6: mod_base = OTHER; note = 2'- fluoro
  modified_base 7: mod_base = OTHER; note = 2'-O- methyl
  modified_base 8: mod_base = OTHER; note = 2'- fluoro
  modified_base 9: mod_base = OTHER; note = 2'-O- methyl
  modified_base 10: mod_base = OTHER; note = 2'- fluoro
  modified_base 11: mod_base = OTHER; note = 2'-O- methyl
  modified_base 12: mod_base = OTHER; note = 2'- fluoro
  modified_base 13: mod_base = OTHER; note = 2'-O- methyl
  modified_base 14: mod_base = OTHER; note = 2'- fluoro
  modified_base 15: mod_base = OTHER; note = 2'-O- methyl
  modified_base 16: mod_base = OTHER; note = 2'- fluoro
  modified_base 17: mod_base = OTHER; note = 2'-O- methyl
  modified_base 18: mod_base = OTHER; note = 2'- fluoro
  modified_base 19: mod_base = OTHER; note = 2'-O- methyl
  modified_base 20: mod_base = OTHER; note = 2'- fluoro
  modified_base 21: mod_base = OTHER; note = 2'-O- methyl, 3'- thiophosphate
  modified_base 22: mod_base = OTHER; note = 2'- fluoro, 3'- thiophosphate
  modified_base 23: mod_base = OTHER; note = 2'-O- methyl
atagtgaggctggatcagcagca

SEQ ID NO: 322 - RNA, 23 nt, synthetic construct
  source 1..23: mol_type = other RNA
  modified_base 1: mod_base = OTHER; note = 2'-O- methyl, 3'- thiophosphate
  modified_base 2: mod_base = OTHER; note = 2'- fluoro, 3'- thiophosphate
  modified_base 3: mod_base = OTHER; note = 2'-O- methyl
  modified_base 4: mod_base = OTHER; note = 2'- fluoro
  modified_base 5: mod_base = OTHER; note = 2'-O- methyl
  modified_base 6: mod_base = OTHER; note = 2'- fluoro
  modified_base 7: mod_base = OTHER; note = 2'-O- methyl
  modified_base 8: mod_base = OTHER; note = 2'- fluoro
  modified_base 9: mod_base = OTHER; note = 2'-O- methyl
  modified_base 10: mod_base = OTHER; note = 2'- fluoro
  modified_base 11: mod_base = OTHER; note = 2'-O- methyl
  modified_base 12: mod_base = OTHER; note = 2'- fluoro
  modified_base 13: mod_base = OTHER; note = 2'-O- methyl
  modified_base 14: mod_base = OTHER; note = 2'- fluoro
  modified_base 15: mod_base = OTHER; note = 2'-O- methyl
  modified_base 16: mod_base = OTHER; note = 2'- fluoro
  modified_base 17: mod_base = OTHER; note = 2'-O- methyl
  modified_base 18: mod_base = OTHER; note = 2'- fluoro
  modified_base 19: mod_base = OTHER; note = 2'-O- methyl
  modified_base 20: mod_base = OTHER; note = 2'- fluoro
  modified_base 21: mod_base = OTHER; note = 2'-O- methyl, 3'- thiophosphate
  modified_base 22: mod_base = OTHER; note = 2'- fluoro, 3'- thiophosphate
  modified_base 23: mod_base = OTHER; note = 2'-O- methyl
tcagaggcatagtgaggctggat

SEQ ID NO: 323 - RNA, 23 nt, synthetic construct
  source 1..23: mol_type = other RNA
  modified_base 1: mod_base = OTHER; note = 2'-O- methyl, 3'- thiophosphate
  modified_base 2: mod_base = OTHER; note = 2'- fluoro, 3'- thiophosphate
  modified_base 3: mod_base = OTHER; note = 2'-O- methyl
  modified_base 4: mod_base = OTHER; note = 2'- fluoro
  modified_base 5: mod_base = OTHER; note = 2'-O- methyl
  modified_base 6: mod_base = OTHER; note = 2'- fluoro
  modified_base 7: mod_base = OTHER; note = 2'-O- methyl
  modified_base 8: mod_base = OTHER; note = 2'- fluoro
  modified_base 9: mod_base = OTHER; note = 2'-O- methyl
  modified_base 10: mod_base = OTHER; note = 2'- fluoro
  modified_base 11: mod_base = OTHER; note = 2'-O- methyl
  modified_base 12: mod_base = OTHER; note = 2'- fluoro
  modified_base 13: mod_base = OTHER; note = 2'-O- methyl
  modified_base 14: mod_base = OTHER; note = 2'- fluoro
  modified_base 15: mod_base = OTHER; note = 2'-O- methyl
  modified_base 16: mod_base = OTHER; note = 2'- fluoro
  modified_base 17: mod_base = OTHER; note = 2'-O- methyl
  modified_base 18: mod_base = OTHER; note = 2'- fluoro
  modified_base 19: mod_base = OTHER; note = 2'-O- methyl
  modified_base 20: mod_base = OTHER; note = 2'- fluoro
  modified_base 21: mod_base = OTHER; note = 2'-O- methyl, 3'- thiophosphate
  modified_base 22: mod_base = OTHER; note = 2'- fluoro, 3'- thiophosphate
  modified_base 23: mod_base = OTHER; note = 2'-O- methyl
aggtcagaggcatagtgaggctg

SEQ ID NO: 324 - RNA, 23 nt, synthetic construct
  source 1..23: mol_type = other RNA
  modified_base 1: mod_base = OTHER; note = 2'-O- methyl, 3'- thiophosphate
  modified_base 2: mod_base = OTHER; note = 2'- fluoro, 3'- thiophosphate
  modified_base 3: mod_base = OTHER; note = 2'-O- methyl
  modified_base 4: mod_base = OTHER; note = 2'- fluoro
  modified_base 5: mod_base = OTHER; note = 2'-O- methyl
  modified_base 6: mod_base = OTHER; note = 2'- fluoro
  modified_base 7: mod_base = OTHER; note = 2'-O- methyl
  modified_base 8: mod_base = OTHER; note = 2'- fluoro
  modified_base 9: mod_base = OTHER; note = 2'-O- methyl
  modified_base 10: mod_base = OTHER; note = 2'- fluoro
  modified_base 11: mod_base = OTHER; note = 2'-O- methyl
  modified_base 12: mod_base = OTHER; note = 2'- fluoro
  modified_base 13: mod_base = OTHER; note = 2'-O- methyl
  modified_base 14: mod_base = OTHER; note = 2'- fluoro
  modified_base 15: mod_base = OTHER; note = 2'-O- methyl
  modified_base 16: mod_base = OTHER; note = 2'- fluoro
  modified_base 17: mod_base = OTHER; note = 2'-O- methyl
  modified_base 18: mod_base = OTHER; note = 2'- fluoro
  modified_base 19: mod_base = OTHER; note = 2'-O- methyl
  modified_base 20: mod_base = OTHER; note = 2'- fluoro
  modified_base 21: mod_base = OTHER; note = 2'-O- methyl, 3'- thiophosphate
  modified_base 22: mod_base = OTHER; note = 2'- fluoro, 3'- thiophosphate
  modified_base 23: mod_base = OTHER; note = 2'-O- methyl
tccaggtcagaggcatagtgagg

SEQ ID NO: 325 - RNA, 23 nt, synthetic construct
  source 1..23: mol_type = other RNA
  modified_base 1: mod_base = OTHER; note = 2'-O- methyl, 3'- thiophosphate
  modified_base 2: mod_base = OTHER; note = 2'- fluoro, 3'- thiophosphate
  modified_base 3: mod_base = OTHER; note = 2'-O- methyl
  modified_base 4: mod_base = OTHER; note = 2'- fluoro
  modified_base 5: mod_base = OTHER; note = 2'-O- methyl
  modified_base 6: mod_base = OTHER; note = 2'- fluoro
  modified_base 7: mod_base = OTHER; note = 2'-O- methyl
  modified_base 8: mod_base = OTHER; note = 2'- fluoro
  modified_base 9: mod_base = OTHER; note = 2'-O- methyl
  modified_base 10: mod_base = OTHER; note = 2'- fluoro
  modified_base 11: mod_base = OTHER; note = 2'-O- methyl
  modified_base 12: mod_base = OTHER; note = 2'- fluoro
  modified_base 13: mod_base = OTHER; note = 2'-O- methyl
  modified_base 14: mod_base = OTHER; note = 2'- fluoro
  modified_base 15: mod_base = OTHER; note = 2'-O- methyl
  modified_base 16: mod_base = OTHER; note = 2'- fluoro
  modified_base 17: mod_base = OTHER; note = 2'-O- methyl
  modified_base 18: mod_base = OTHER; note = 2'- fluoro
  modified_base 19: mod_base = OTHER; note = 2'-O- methyl
  modified_base 20: mod_base = OTHER; note = 2'- fluoro
  modified_base 21: mod_base = OTHER; note = 2'-O- methyl, 3'- thiophosphate
  modified_base 22: mod_base = OTHER; note = 2'- fluoro, 3'- thiophosphate
  modified_base 23: mod_base = OTHER; note = 2'-O- methyl
tgtccaggtcagaggcatagtga

SEQ ID NO: 326 - RNA, 23 nt, synthetic construct
  source 1..23: mol_type = other RNA
  modified_base 1: mod_base = OTHER; note = 2'-O- methyl, 3'- thiophosphate
  modified_base 2: mod_base = OTHER; note = 2'- fluoro, 3'- thiophosphate
  modified_base 3: mod_base = OTHER; note = 2'-O- methyl
  modified_base 4: mod_base = OTHER; note = 2'- fluoro
  modified_base 5: mod_base = OTHER; note = 2'-O- methyl
  modified_base 6: mod_base = OTHER; note = 2'- fluoro
  modified_base 7: mod_base = OTHER; note = 2'-O- methyl
  modified_base 8: mod_base = OTHER; note = 2'- fluoro
  modified_base 9: mod_base = OTHER; note = 2'-O- methyl
  modified_base 10: mod_base = OTHER; note = 2'- fluoro
  modified_base 11: mod_base = OTHER; note = 2'-O- methyl
  modified_base 12: mod_base = OTHER; note = 2'- fluoro
  modified_base 13: mod_base = OTHER; note = 2'-O- methyl
  modified_base 14: mod_base = OTHER; note = 2'- fluoro
  modified_base 15: mod_base = OTHER; note = 2'-O- methyl
  modified_base 16: mod_base = OTHER; note = 2'- fluoro
  modified_base 17: mod_base = OTHER; note = 2'-O- methyl
  modified_base 18: mod_base = OTHER; note = 2'- fluoro
  modified_base 19: mod_base = OTHER; note = 2'-O- methyl
  modified_base 20: mod_base = OTHER; note = 2'- fluoro
  modified_base 21: mod_base = OTHER; note = 2'-O- methyl, 3'- thiophosphate
  modified_base 22: mod_base = OTHER; note = 2'- fluoro, 3'- thiophosphate
  modified_base 23: mod_base = OTHER; note = 2'-O- methyl
ttgtccaggtcagaggcatagtg

SEQ ID NO: 327 - RNA, 23 nt, synthetic construct
  source 1..23: mol_type = other RNA
  modified_base 1: mod_base = OTHER; note = 2'-O- methyl, 3'- thiophosphate
  modified_base 2: mod_base = OTHER; note = 2'- fluoro, 3'- thiophosphate
  modified_base 3: mod_base = OTHER; note = 2'-O- methyl
  modified_base 4: mod_base = OTHER; note = 2'- fluoro
  modified_base 5: mod_base = OTHER; note = 2'-O- methyl
  modified_base 6: mod_base = OTHER; note = 2'- fluoro
  modified_base 7: mod_base = OTHER; note = 2'-O- methyl
  modified_base 8: mod_base = OTHER; note = 2'- fluoro
  modified_base 9: mod_base = OTHER; note = 2'-O- methyl
  modified_base 10: mod_base = OTHER; note = 2'- fluoro
  modified_base 11: mod_base = OTHER; note = 2'-O- methyl
  modified_base 12: mod_base = OTHER; note = 2'- fluoro
  modified_base 13: mod_base = OTHER; note = 2'-O- methyl
  modified_base 14: mod_base = OTHER; note = 2'- fluoro
  modified_base 15: mod_base = OTHER; note = 2'-O- methyl
  modified_base 16: mod_base = OTHER; note = 2'- fluoro
  modified_base 17: mod_base = OTHER; note = 2'-O- methyl
  modified_base 18: mod_base = OTHER; note = 2'- fluoro
  modified_base 19: mod_base = OTHER; note = 2'-O- methyl
  modified_base 20: mod_base = OTHER; note = 2'- fluoro
  modified_base 21: mod_base = OTHER; note = 2'-O- methyl, 3'- thiophosphate
  modified_base 22: mod_base = OTHER; note = 2'- fluoro, 3'- thiophosphate
  modified_base 23: mod_base = OTHER; note = 2'-O- methyl
tccaccttgtccaggtcagaggc

SEQ ID NO: 328 - RNA, 23 nt, synthetic construct
  source 1..23: mol_type = other RNA
  modified_base 1: mod_base = OTHER; note = 2'-O- methyl, 3'- thiophosphate
  modified_base 2: mod_base = OTHER; note = 2'- fluoro, 3'- thiophosphate
  modified_base 3: mod_base = OTHER; note = 2'-O- methyl
  modified_base 4: mod_base = OTHER; note = 2'- fluoro
  modified_base 5: mod_base = OTHER; note = 2'-O- methyl
  modified_base 6: mod_base = OTHER; note = 2'- fluoro
  modified_base 7: mod_base = OTHER; note = 2'-O- methyl
  modified_base 8: mod_base = OTHER; note = 2'- fluoro
  modified_base 9: mod_base = OTHER; note = 2'-O- methyl
  modified_base 10: mod_base = OTHER; note = 2'- fluoro
  modified_base 11: mod_base = OTHER; note = 2'-O- methyl
  modified_base 12: mod_base = OTHER; note = 2'- fluoro
  modified_base 13: mod_base = OTHER; note = 2'-O- methyl
  modified_base 14: mod_base = OTHER; note = 2'- fluoro
  modified_base 15: mod_base = OTHER; note = 2'-O- methyl
  modified_base 16: mod_base = OTHER; note = 2'- fluoro
  modified_base 17: mod_base = OTHER; note = 2'-O- methyl
  modified_base 18: mod_base = OTHER; note = 2'- fluoro
  modified_base 19: mod_base = OTHER; note = 2'-O- methyl
  modified_base 20: mod_base = OTHER; note = 2'- fluoro
  modified_base 21: mod_base = OTHER; note = 2'-O- methyl, 3'- thiophosphate
  modified_base 22: mod_base = OTHER; note = 2'- fluoro, 3'- thiophosphate
  modified_base 23: mod_base = OTHER; note = 2'-O- methyl
accctccaccttgtccaggtcag

SEQ ID NO: 329 - RNA, 23 nt, synthetic construct
  source 1..23: mol_type = other RNA
  modified_base 1: mod_base = OTHER; note = 2'-O- methyl, 3'- thiophosphate
  modified_base 2: mod_base = OTHER; note = 2'- fluoro, 3'- thiophosphate
  modified_base 3: mod_base = OTHER; note = 2'-O- methyl
  modified_base 4: mod_base = OTHER; note = 2'- fluoro
  modified_base 5: mod_base = OTHER; note = 2'-O- methyl
  modified_base 6: mod_base = OTHER; note = 2'- fluoro
  modified_base 7: mod_base = OTHER; note = 2'-O- methyl
  modified_base 8: mod_base = OTHER; note = 2'- fluoro
  modified_base 9: mod_base = OTHER; note = 2'-O- methyl
  modified_base 10: mod_base = OTHER; note = 2'- fluoro
  modified_base 11: mod_base = OTHER; note = 2'-O- methyl
  modified_base 12: mod_base = OTHER; note = 2'- fluoro
  modified_base 13: mod_base = OTHER; note = 2'-O- methyl
  modified_base 14: mod_base = OTHER; note = 2'- fluoro
  modified_base 15: mod_base = OTHER; note = 2'-O- methyl
  modified_base 16: mod_base = OTHER; note = 2'- fluoro
  modified_base 17: mod_base = OTHER; note = 2'-O- methyl
  modified_base 18: mod_base = OTHER; note = 2'- fluoro
  modified_base 19: mod_base = OTHER; note = 2'-O- methyl
  modified_base 20: mod_base = OTHER; note = 2'- fluoro
  modified_base 21: mod_base = OTHER; note = 2'-O- methyl, 3'- thiophosphate
  modified_base 22: mod_base = OTHER; note = 2'- fluoro, 3'- thiophosphate
  modified_base 23: mod_base = OTHER; note = 2'-O- methyl
tgagaccctccaccttgtccagg

SEQ ID NO: 330 - RNA, 22 nt, synthetic construct
  source 1..22: mol_type = other RNA
  modified_base 1: mod_base = OTHER; note = 2'-O- methyl, 3'- thiophosphate
  modified_base 2: mod_base = OTHER; note = 2'- fluoro, 3'- thiophosphate
  modified_base 3: mod_base = OTHER; note = 2'-O- methyl
  modified_base 4: mod_base = OTHER; note = 2'- fluoro
  modified_base 5: mod_base = OTHER; note = 2'-O- methyl
  modified_base 6: mod_base = OTHER; note = 2'- fluoro
  modified_base 7: mod_base = OTHER; note = 2'-O- methyl
  modified_base 8: mod_base = OTHER; note = 2'- fluoro
  modified_base 9: mod_base = OTHER; note = 2'-O- methyl
  modified_base 10: mod_base = OTHER; note = 2'- fluoro
  modified_base 11: mod_base = OTHER; note = 2'-O- methyl
  modified_base 12: mod_base = OTHER; note = 2'- fluoro
  modified_base 13: mod_base = OTHER; note = 2'-O- methyl
  modified_base 14: mod_base = OTHER; note = 2'- fluoro
  modified_base 15: mod_base = OTHER; note = 2'-O- methyl
  modified_base 16: mod_base = OTHER; note = 2'- fluoro
  modified_base 17: mod_base = OTHER; note = 2'-O- methyl
  modified_base 18: mod_base = OTHER; note = 2'- fluoro
  modified_base 19: mod_base = OTHER; note = 2'-O- methyl
  modified_base 20: mod_base = OTHER; note = 2'- fluoro, 3'- thiophosphate
  modified_base 21: mod_base = OTHER; note = 2'-O- methyl, 3'- thiophosphate
  modified_base 22: mod_base = OTHER; note = 2'- fluoro
aagtgagaccctccaccttgtc

SEQ ID NO: 331 - RNA, 23 nt, synthetic construct
  source 1..23: mol_type = other RNA
  modified_base 1: mod_base = OTHER; note = 2'-O- methyl, 3'- thiophosphate
  modified_base 2: mod_base = OTHER; note = 2'- fluoro, 3'- thiophosphate
  modified_base 3: mod_base = OTHER; note = 2'-O- methyl
  modified_base 4: mod_base = OTHER; note = 2'- fluoro
  modified_base 5: mod_base = OTHER; note = 2'-O- methyl
  modified_base 6: mod_base = OTHER; note = 2'- fluoro
  modified_base 7: mod_base = OTHER; note = 2'-O- methyl
  modified_base 8: mod_base = OTHER; note = 2'- fluoro
  modified_base 9: mod_base = OTHER; note = 2'-O- methyl
  modified_base 10: mod_base = OTHER; note = 2'- fluoro
  modified_base 11: mod_base = OTHER; note = 2'-O- methyl
  modified_base 12: mod_base = OTHER; note = 2'- fluoro
  modified_base 13: mod_base = OTHER; note = 2'-O- methyl
  modified_base 14: mod_base = OTHER; note = 2'- fluoro
  modified_base 15: mod_base = OTHER; note = 2'-O- methyl
  modified_base 16: mod_base = OTHER; note = 2'- fluoro
  modified_base 17: mod_base = OTHER; note = 2'-O- methyl
  modified_base 18: mod_base = OTHER; note = 2'- fluoro
  modified_base 19: mod_base = OTHER; note = 2'-O- methyl
  modified_base 20: mod_base = OTHER; note = 2'- fluoro
  modified_base 21: mod_base = OTHER; note = 2'-O- methyl, 3'- thiophosphate
  modified_base 22: mod_base = OTHER; note = 2'- fluoro, 3'- thiophosphate
  modified_base 23: mod_base = OTHER; note = 2'-O- methyl
tgctggaaagtgagaccctccac

SEQ ID NO: 332 - RNA, 23 nt, synthetic construct
  source 1..23: mol_type = other RNA
  modified_base 1: mod_base = OTHER; note = 2'-O- methyl, 3'- thiophosphate
  modified_base 2: mod_base = OTHER; note = 2'- fluoro, 3'- thiophosphate
  modified_base 3: mod_base = OTHER; note = 2'-O- methyl
  modified_base 4: mod_base = OTHER; note = 2'- fluoro
  modified_base 5: mod_base = OTHER; note = 2'-O- methyl
  modified_base 6: mod_base = OTHER; note = 2'- fluoro
  modified_base 7: mod_base = OTHER; note = 2'-O- methyl
  modified_base 8: mod_base = OTHER; note = 2'- fluoro
  modified_base 9: mod_base = OTHER; note = 2'-O- methyl
  modified_base 10: mod_base = OTHER; note = 2'- fluoro
  modified_base 11: mod_base = OTHER; note = 2'-O- methyl
  modified_base 12: mod_base = OTHER; note = 2'- fluoro
  modified_base 13: mod_base = OTHER; note = 2'-O- methyl
  modified_base 14: mod_base = OTHER; note = 2'- fluoro
  modified_base 15: mod_base = OTHER; note = 2'-O- methyl
  modified_base 16: mod_base = OTHER; note = 2'- fluoro
  modified_base 17: mod_base = OTHER; note = 2'-O- methyl
  modified_base 18: mod_base = OTHER; note = 2'- fluoro
  modified_base 19: mod_base = OTHER; note = 2'-O- methyl
  modified_base 20: mod_base = OTHER; note = 2'- fluoro
  modified_base 21: mod_base = OTHER; note = 2'-O- methyl, 3'- thiophosphate
  modified_base 22: mod_base = OTHER; note = 2'- fluoro, 3'- thiophosphate
  modified_base 23: mod_base = OTHER; note = 2'-O- methyl
ttcagcacctcccccaccctgat

SEQ ID NO: 333 - RNA, 23 nt, synthetic construct
  source 1..23: mol_type = other RNA
  modified_base 1: mod_base = OTHER; note = 2'-O- methyl, 3'- thiophosphate
  modified_base 2: mod_base = OTHER; note = 2'- fluoro, 3'- thiophosphate
  modified_base 3: mod_base = OTHER; note = 2'-O- methyl
  modified_base 4: mod_base = OTHER; note = 2'- fluoro
  modified_base 5: mod_base = OTHER; note = 2'-O- methyl
  modified_base 6: mod_base = OTHER; note = 2'- fluoro
  modified_base 7: mod_base = OTHER; note = 2'-O- methyl
  modified_base 8: mod_base = OTHER; note = 2'- fluoro
  modified_base 9: mod_base = OTHER; note = 2'-O- methyl
  modified_base 10: mod_base = OTHER; note = 2'- fluoro
  modified_base 11: mod_base = OTHER; note = 2'-O- methyl
  modified_base 12: mod_base = OTHER; note = 2'- fluoro
  modified_base 13: mod_base = OTHER; note = 2'-O- methyl
  modified_base 14: mod_base = OTHER; note = 2'- fluoro
  modified_base 15: mod_base = OTHER; note = 2'-O- methyl
  modified_base 16: mod_base = OTHER; note = 2'- fluoro
  modified_base 17: mod_base = OTHER; note = 2'-O- methyl
  modified_base 18: mod_base = OTHER; note = 2'- fluoro
  modified_base 19: mod_base = OTHER; note = 2'-O- methyl
  modified_base 20: mod_base = OTHER; note = 2'- fluoro
  modified_base 21: mod_base = OTHER; note = 2'-O- methyl, 3'- thiophosphate
  modified_base 22: mod_base = OTHER; note = 2'- fluoro, 3'- thiophosphate
  modified_base 23: mod_base = OTHER; note = 2'-O- methyl
tgttcagcacctcccccaccctg

SEQ ID NO: 334 - RNA, 23 nt, synthetic construct
  source 1..23: mol_type = other RNA
  modified_base 1: mod_base = OTHER; note = 2'-O- methyl, 3'- thiophosphate
  modified_base 2: mod_base = OTHER; note = 2'- fluoro, 3'- thiophosphate
  modified_base 3: mod_base = OTHER; note = 2'-O- methyl
  modified_base 4: mod_base = OTHER; note = 2'- fluoro
  modified_base 5: mod_base = OTHER; note = 2'-O- methyl
  modified_base 6: mod_base = OTHER; note = 2'- fluoro
  modified_base 7: mod_base = OTHER; note = 2'-O- methyl
  modified_base 8: mod_base = OTHER; note = 2'- fluoro
  modified_base 9: mod_base = OTHER; note = 2'-O- methyl
  modified_base 10: mod_base = OTHER; note = 2'- fluoro
  modified_base 11: mod_base = OTHER; note = 2'-O- methyl
  modified_base 12: mod_base = OTHER; note = 2'- fluoro
  modified_base 13: mod_base = OTHER; note = 2'-O- methyl
  modified_base 14: mod_base = OTHER; note = 2'- fluoro
  modified_base 15: mod_base = OTHER; note = 2'-O- methyl
  modified_base 16: mod_base = OTHER; note = 2'- fluoro
  modified_base 17: mod_base = OTHER; note = 2'-O- methyl
  modified_base 18: mod_base = OTHER; note = 2'- fluoro
  modified_base 19: mod_base = OTHER; note = 2'-O- methyl
  modified_base 20: mod_base = OTHER; note = 2'- fluoro
  modified_base 21: mod_base = OTHER; note = 2'-O- methyl, 3'- thiophosphate
  modified_base 22: mod_base = OTHER; note = 2'- fluoro, 3'- thiophosphate
  modified_base 23: mod_base = OTHER; note = 2'-O- methyl
tgctgttcagcacctcccccacc

SEQ ID NO: 335 - RNA, 23 nt, synthetic construct
  source 1..23: mol_type = other RNA
  modified_base 1: mod_base = OTHER; note = 2'-O- methyl, 3'- thiophosphate
  modified_base 2: mod_base = OTHER; note = 2'- fluoro, 3'- thiophosphate
  modified_base 3: mod_base = OTHER; note = 2'-O- methyl
  modified_base 4: mod_base = OTHER; note = 2'- fluoro
  modified_base 5: mod_base = OTHER; note = 2'-O- methyl
  modified_base 6: mod_base = OTHER; note = 2'- fluoro
  modified_base 7: mod_base = OTHER; note = 2'-O- methyl
  modified_base 8: mod_base = OTHER; note = 2'- fluoro
  modified_base 9: mod_base = OTHER; note = 2'-O- methyl
  modified_base 10: mod_base = OTHER; note = 2'- fluoro
  modified_base 11: mod_base = OTHER; note = 2'-O- methyl
  modified_base 12: mod_base = OTHER; note = 2'- fluoro
  modified_base 13: mod_base = OTHER; note = 2'-O- methyl
  modified_base 14: mod_base = OTHER; note = 2'- fluoro
  modified_base 15: mod_base = OTHER; note = 2'-O- methyl
  modified_base 16: mod_base = OTHER; note = 2'- fluoro
  modified_base 17: mod_base = OTHER; note = 2'-O- methyl
  modified_base 18: mod_base = OTHER; note = 2'- fluoro
  modified_base 19: mod_base = OTHER; note = 2'-O- methyl
  modified_base 20: mod_base = OTHER; note = 2'- fluoro
  modified_base 21: mod_base = OTHER; note = 2'-O- methyl, 3'- thiophosphate
  modified_base 22: mod_base = OTHER; note = 2'- fluoro, 3'- thiophosphate
  modified_base 23: mod_base = OTHER; note = 2'-O- methyl
atgctgttcagcacctcccccac

SEQ ID NO: 336 - RNA, 23 nt, synthetic construct
  source 1..23: mol_type = other RNA
  modified_base 1: mod_base = OTHER; note = 2'-O- methyl, 3'- thiophosphate
  modified_base 2: mod_base = OTHER; note = 2'- fluoro, 3'- thiophosphate
  modified_base 3: mod_base = OTHER; note = 2'-O- methyl
  modified_base 4: mod_base = OTHER; note = 2'- fluoro
  modified_base 5: mod_base = OTHER; note = 2'-O- methyl
  modified_base 6: mod_base = OTHER; note = 2'- fluoro
  modified_base 7: mod_base = OTHER; note = 2'-O- methyl
  modified_base 8: mod_base = OTHER; note = 2'- fluoro
  modified_base 9: mod_base = OTHER; note = 2'-O- methyl
  modified_base 10: mod_base = OTHER; note = 2'- fluoro
  modified_base 11: mod_base = OTHER; note = 2'-O- methyl
  modified_base 12: mod_base = OTHER; note = 2'- fluoro
  modified_base 13: mod_base = OTHER; note = 2'-O- methyl
  modified_base 14: mod_base = OTHER; note = 2'- fluoro
  modified_base 15: mod_base = OTHER; note = 2'-O- methyl
  modified_base 16: mod_base = OTHER; note = 2'- fluoro
  modified_base 17: mod_base = OTHER; note = 2'-O- methyl
  modified_base 18: mod_base = OTHER; note = 2'- fluoro
  modified_base 19: mod_base = OTHER; note = 2'-O- methyl
  modified_base 20: mod_base = OTHER; note = 2'- fluoro
  modified_base 21: mod_base = OTHER; note = 2'-O- methyl, 3'- thiophosphate
  modified_base 22: mod_base = OTHER; note = 2'- fluoro, 3'- thiophosphate
  modified_base 23: mod_base = OTHER; note = 2'-O- methyl
aatgctgttcagcacctccccca

SEQ ID NO: 337 - RNA, 23 nt, synthetic construct
  source 1..23: mol_type = other RNA
  modified_base 1: mod_base = OTHER; note = 2'-O- methyl, 3'- thiophosphate
  modified_base 2: mod_base = OTHER; note = 2'- fluoro, 3'- thiophosphate
  modified_base 3: mod_base = OTHER; note = 2'-O- methyl
  modified_base 4: mod_base = OTHER; note = 2'- fluoro
  modified_base 5: mod_base = OTHER; note = 2'-O- methyl
  modified_base 6: mod_base = OTHER; note = 2'- fluoro
  modified_base 7: mod_base = OTHER; note = 2'-O- methyl
  modified_base 8: mod_base = OTHER; note = 2'- fluoro
  modified_base 9: mod_base = OTHER; note = 2'-O- methyl
  modified_base 10: mod_base = OTHER; note = 2'- fluoro
  modified_base 11: mod_base = OTHER; note = 2'-O- methyl
  modified_base 12: mod_base = OTHER; note = 2'- fluoro
  modified_base 13: mod_base = OTHER; note = 2'-O- methyl
  modified_base 14: mod_base = OTHER; note = 2'- fluoro
  modified_base 15: mod_base = OTHER; note = 2'-O- methyl
  modified_base 16: mod_base = OTHER; note = 2'- fluoro
  modified_base 17: mod_base = OTHER; note = 2'-O- methyl
  modified_base 18: mod_base = OTHER; note = 2'- fluoro
  modified_base 19: mod_base = OTHER; note = 2'-O- methyl
  modified_base 20: mod_base = OTHER; note = 2'- fluoro
  modified_base 21: mod_base = OTHER; note = 2'-O- methyl, 3'- thiophosphate
  modified_base 22: mod_base = OTHER; note = 2'- fluoro, 3'- thiophosphate
  modified_base 23: mod_base = OTHER; note = 2'-O- methyl
aaatgctgttcagcacctccccc

SEQ ID NO: 338 - RNA, 23 nt, synthetic construct
  source 1..23: mol_type = other RNA
  modified_base 1: mod_base = OTHER; note = 2'-O- methyl, 3'- thiophosphate
  modified_base 2: mod_base = OTHER; note = 2'- fluoro, 3'- thiophosphate
  modified_base 3: mod_base = OTHER; note = 2'-O- methyl
  modified_base 4: mod_base = OTHER; note = 2'- fluoro
  modified_base 5: mod_base = OTHER; note = 2'-O- methyl
  modified_base 6: mod_base = OTHER; note = 2'- fluoro
  modified_base 7: mod_base = OTHER; note = 2'-O- methyl
  modified_base 8: mod_base = OTHER; note = 2'- fluoro
  modified_base 9: mod_base = OTHER; note = 2'-O- methyl
  modified_base 10: mod_base = OTHER; note = 2'- fluoro
  modified_base 11: mod_base = OTHER; note = 2'-O- methyl
  modified_base 12: mod_base = OTHER; note = 2'- fluoro
  modified_base 13: mod_base = OTHER; note = 2'-O- methyl
  modified_base 14: mod_base = OTHER; note = 2'- fluoro
  modified_base 15: mod_base = OTHER; note = 2'-O- methyl
  modified_base 16: mod_base = OTHER; note = 2'- fluoro
  modified_base 17: mod_base = OTHER; note = 2'-O- methyl
  modified_base 18: mod_base = OTHER; note = 2'- fluoro
  modified_base 19: mod_base = OTHER; note = 2'-O- methyl
  modified_base 20: mod_base = OTHER; note = 2'- fluoro
  modified_base 21: mod_base = OTHER; note = 2'-O- methyl, 3'- thiophosphate
  modified_base 22: mod_base = OTHER; note = 2'- fluoro, 3'- thiophosphate
  modified_base 23: mod_base = OTHER; note = 2'-O- methyl
aagctcaaaaaaaatgctgttca

SEQ ID NO: 339 - RNA, 23 nt, synthetic construct
  source 1..23: mol_type = other RNA
  modified_base 1: mod_base = OTHER; note = 2'-O- methyl, 3'- thiophosphate
  modified_base 2: mod_base = OTHER; note = 2'- fluoro, 3'- thiophosphate
  modified_base 3: mod_base = OTHER; note = 2'-O- methyl
  modified_base 4: mod_base = OTHER; note = 2'- fluoro
  modified_base 5: mod_base = OTHER; note = 2'-O- methyl
  modified_base 6: mod_base = OTHER; note = 2'- fluoro
  modified_base 7: mod_base = OTHER; note = 2'-O- methyl
  modified_base 8: mod_base = OTHER; note = 2'- fluoro
  modified_base 9: mod_base = OTHER; note = 2'-O- methyl
  modified_base 10: mod_base = OTHER; note = 2'- fluoro
  modified_base 11: mod_base = OTHER; note = 2'-O- methyl
  modified_base 12: mod_base = OTHER; note = 2'- fluoro
  modified_base 13: mod_base = OTHER; note = 2'-O- methyl
  modified_base 14: mod_base = OTHER; note = 2'- fluoro
  modified_base 15: mod_base = OTHER; note = 2'-O- methyl
  modified_base 16: mod_base = OTHER; note = 2'- fluoro
  modified_base 17: mod_base = OTHER; note = 2'-O- methyl
  modified_base 18: mod_base = OTHER; note = 2'- fluoro
  modified_base 19: mod_base = OTHER; note = 2'-O- methyl
  modified_base 20: mod_base = OTHER; note = 2'- fluoro
  modified_base 21: mod_base = OTHER; note = 2'-O- methyl, 3'- thiophosphate
  modified_base 22: mod_base = OTHER; note = 2'- fluoro, 3'- thiophosphate
  modified_base 23: mod_base = OTHER; note = 2'-O- methyl
tcaagctcaaaaaaaatgctgtt

SEQ ID NO: 340 - RNA, 23 nt, synthetic construct
  source 1..23: mol_type = other RNA
  modified_base 1: mod_base = OTHER; note = 2'-O- methyl, 3'- thiophosphate
  modified_base 2: mod_base = OTHER; note = 2'- fluoro, 3'- thiophosphate
  modified_base 3: mod_base = OTHER; note = 2'-O- methyl
  modified_base 4: mod_base = OTHER; note = 2'- fluoro
  modified_base 5: mod_base = OTHER; note = 2'-O- methyl
  modified_base 6: mod_base = OTHER; note = 2'- fluoro
  modified_base 7: mod_base = OTHER; note = 2'-O- methyl
  modified_base 8: mod_base = OTHER; note = 2'- fluoro
  modified_base 9: mod_base = OTHER; note = 2'-O- methyl
  modified_base 10: mod_base = OTHER; note = 2'- fluoro
  modified_base 11: mod_base = OTHER; note = 2'-O- methyl
  modified_base 12: mod_base = OTHER; note = 2'- fluoro
  modified_base 13: mod_base = OTHER; note = 2'-O- methyl
  modified_base 14: mod_base = OTHER; note = 2'- fluoro
  modified_base 15: mod_base = OTHER; note = 2'-O- methyl
  modified_base 16: mod_base = OTHER; note = 2'- fluoro
  modified_base 17: mod_base = OTHER; note = 2'-O- methyl
  modified_base 18: mod_base = OTHER; note = 2'- fluoro
  modified_base 19: mod_base = OTHER; note = 2'-O- methyl
  modified_base 20: mod_base = OTHER; note = 2'- fluoro
  modified_base 21: mod_base = OTHER; note = 2'-O- methyl, 3'- thiophosphate
  modified_base 22: mod_base = OTHER; note = 2'- fluoro, 3'- thiophosphate
  modified_base 23: mod_base = OTHER; note = 2'-O- methyl
ttcaagctcaaaaaaaatgctgt

SEQ ID NO: 341 - RNA, 23 nt, synthetic construct
  source 1..23: mol_type = other RNA
  modified_base 1: mod_base = OTHER; note = 2'-O- methyl, 3'- thiophosphate
  modified_base 2: mod_base = OTHER; note = 2'- fluoro, 3'- thiophosphate
  modified_base 3: mod_base = OTHER; note = 2'-O- methyl
  modified_base 4: mod_base = OTHER; note = 2'- fluoro
  modified_base 5: mod_base = OTHER; note = 2'-O- methyl
  modified_base 6: mod_base = OTHER; note = 2'- fluoro
  modified_base 7: mod_base = OTHER; note = 2'-O- methyl
  modified_base 8: mod_base = OTHER; note = 2'- fluoro
  modified_base 9: mod_base = OTHER; note = 2'-O- methyl
  modified_base 10: mod_base = OTHER; note = 2'- fluoro
  modified_base 11: mod_base = OTHER; note = 2'-O- methyl
  modified_base 12: mod_base = OTHER; note = 2'- fluoro
  modified_base 13: mod_base = OTHER; note = 2'-O- methyl
  modified_base 14: mod_base = OTHER; note = 2'- fluoro
  modified_base 15: mod_base = OTHER; note = 2'-O- methyl
  modified_base 16: mod_base = OTHER; note = 2'- fluoro
  modified_base 17: mod_base = OTHER; note = 2'-O- methyl
  modified_base 18: mod_base = OTHER; note = 2'- fluoro
  modified_base 19: mod_base = OTHER; note = 2'-O- methyl
  modified_base 20: mod_base = OTHER; note = 2'- fluoro
  modified_base 21: mod_base = OTHER; note = 2'-O- methyl, 3'- thiophosphate
  modified_base 22: mod_base = OTHER; note = 2'- fluoro, 3'- thiophosphate
  modified_base 23: mod_base = OTHER; note = 2'-O- methyl
aatgggcggttcagggtcacctc

SEQ ID NO: 342 - RNA, 23 nt, synthetic construct
  source 1..23: mol_type = other RNA
  modified_base 1: mod_base = OTHER; note = 2'-O- methyl, 3'- thiophosphate
  modified_base 2: mod_base = OTHER; note = 2'- fluoro, 3'- thiophosphate
  modified_base 3: mod_base = OTHER; note = 2'-O- methyl
  modified_base 4: mod_base = OTHER; note = 2'- fluoro
  modified_base 5: mod_base = OTHER; note = 2'-O- methyl
  modified_base 6: mod_base = OTHER; note = 2'- fluoro
  modified_base 7: mod_base = OTHER; note = 2'-O- methyl
  modified_base 8: mod_base = OTHER; note = 2'- fluoro
  modified_base 9: mod_base = OTHER; note = 2'-O- methyl
  modified_base 10: mod_base = OTHER; note = 2'- fluoro
  modified_base 11: mod_base = OTHER; note = 2'-O- methyl
  modified_base 12: mod_base = OTHER; note = 2'- fluoro
  modified_base 13: mod_base = OTHER; note = 2'-O- methyl
  modified_base 14: mod_base = OTHER; note = 2'- fluoro
  modified_base 15: mod_base = OTHER; note = 2'-O- methyl
  modified_base 16: mod_base = OTHER; note = 2'- fluoro
  modified_base 17: mod_base = OTHER; note = 2'-O- methyl
  modified_base 18: mod_base = OTHER; note = 2'- fluoro
  modified_base 19: mod_base = OTHER; note = 2'-O- methyl
  modified_base 20: mod_base = OTHER; note = 2'- fluoro
  modified_base 21: mod_base = OTHER; note = 2'-O- methyl, 3'- thiophosphate
  modified_base 22: mod_base = OTHER; note = 2'- fluoro, 3'- thiophosphate
  modified_base 23: mod_base = OTHER; note = 2'-O- methyl
aggaatgggcggttcagggtcac

SEQ ID NO: 343 - RNA, 23 nt, synthetic construct
  source 1..23: mol_type = other RNA
  modified_base 1: mod_base = OTHER; note = 2'-O- methyl, 3'- thiophosphate
  modified_base 2: mod_base = OTHER; note = 2'- fluoro, 3'- thiophosphate
  modified_base 3: mod_base = OTHER; note = 2'-O- methyl
  modified_base 4: mod_base = OTHER; note = 2'- fluoro
  modified_base 5: mod_base = OTHER; note = 2'-O- methyl
  modified_base 6: mod_base = OTHER; note = 2'- fluoro
  modified_base 7: mod_base = OTHER; note = 2'-O- methyl
  modified_base 8: mod_base = OTHER; note = 2'- fluoro
  modified_base 9: mod_base = OTHER; note = 2'-O- methyl
  modified_base 10: mod_base = OTHER; note = 2'- fluoro
  modified_base 11: mod_base = OTHER; note = 2'-O- methyl
  modified_base 12: mod_base = OTHER; note = 2'- fluoro
  modified_base 13: mod_base = OTHER; note = 2'-O- methyl
  modified_base 14: mod_base = OTHER; note = 2'- fluoro
  modified_base 15: mod_base = OTHER; note = 2'-O- methyl
  modified_base 16: mod_base = OTHER; note = 2'- fluoro
  modified_base 17: mod_base = OTHER; note = 2'-O- methyl
  modified_base 18: mod_base = OTHER; note = 2'- fluoro
  modified_base 19: mod_base = OTHER; note = 2'-O- methyl
  modified_base 20: mod_base = OTHER; note = 2'- fluoro
  modified_base 21: mod_base = OTHER; note = 2'-O- methyl, 3'- thiophosphate
  modified_base 22: mod_base = OTHER; note = 2'- fluoro, 3'- thiophosphate
  modified_base 23: mod_base = OTHER; note = 2'-O- methyl
acaggaatgggcggttcagggtc

SEQ ID NO: 344 - RNA, 23 nt, synthetic construct
  source 1..23: mol_type = other RNA
  modified_base 1: mod_base = OTHER; note = 2'-O- methyl, 3'- thiophosphate
  modified_base 2: mod_base = OTHER; note = 2'- fluoro, 3'- thiophosphate
  modified_base 3: mod_base = OTHER; note = 2'-O- methyl
  modified_base 4: mod_base = OTHER; note = 2'- fluoro
  modified_base 5: mod_base = OTHER; note = 2'-O- methyl
  modified_base 6: mod_base = OTHER; note = 2'- fluoro
  modified_base 7: mod_base = OTHER; note = 2'-O- methyl
  modified_base 8: mod_base = OTHER; note = 2'- fluoro
  modified_base 9: mod_base = OTHER; note = 2'-O- methyl
  modified_base 10: mod_base = OTHER; note = 2'- fluoro
  modified_base 11: mod_base = OTHER; note = 2'-O- methyl
  modified_base 12: mod_base = OTHER; note = 2'- fluoro
  modified_base 13: mod_base = OTHER; note = 2'-O- methyl
  modified_base 14: mod_base = OTHER; note = 2'- fluoro
  modified_base 15: mod_base = OTHER; note = 2'-O- methyl
  modified_base 16: mod_base = OTHER; note = 2'- fluoro
  modified_base 17: mod_base = OTHER; note = 2'-O- methyl
  modified_base 18: mod_base = OTHER; note = 2'- fluoro
  modified_base 19: mod_base = OTHER; note = 2'-O- methyl
  modified_base 20: mod_base = OTHER; note = 2'- fluoro
  modified_base 21: mod_base = OTHER; note = 2'-O- methyl, 3'- thiophosphate
  modified_base 22: mod_base = OTHER; note = 2'- fluoro, 3'- thiophosphate
  modified_base 23: mod_base = OTHER; note = 2'-O- methyl
aaacaggaatgggcggttcaggg

SEQ ID NO: 345 - RNA, 23 nt, synthetic construct
  source 1..23: mol_type = other RNA
  modified_base 1: mod_base = OTHER; note = 2'-O- methyl, 3'- thiophosphate
  modified_base 2: mod_base = OTHER; note = 2'- fluoro, 3'- thiophosphate
  modified_base 3: mod_base = OTHER; note = 2'-O- methyl
  modified_base 4: mod_base = OTHER; note = 2'- fluoro
  modified_base 5: mod_base = OTHER; note = 2'-O- methyl
  modified_base 6: mod_base = OTHER; note = 2'- fluoro
  modified_base 7: mod_base = OTHER; note = 2'-O- methyl
  modified_base 8: mod_base = OTHER; note = 2'- fluoro
  modified_base 9: mod_base = OTHER; note = 2'-O- methyl
  modified_base 10: mod_base = OTHER; note = 2'- fluoro
  modified_base 11: mod_base = OTHER; note = 2'-O- methyl
  modified_base 12: mod_base = OTHER; note = 2'- fluoro
  modified_base 13: mod_base = OTHER; note = 2'-O- methyl
  modified_base 14: mod_base = OTHER; note = 2'- fluoro
  modified_base 15: mod_base = OTHER; note = 2'-O- methyl
  modified_base 16: mod_base = OTHER; note = 2'- fluoro
  modified_base 17: mod_base = OTHER; note = 2'-O- methyl
  modified_base 18: mod_base = OTHER; note = 2'- fluoro
  modified_base 19: mod_base = OTHER; note = 2'-O- methyl
  modified_base 20: mod_base = OTHER; note = 2'- fluoro
  modified_base 21: mod_base = OTHER; note = 2'-O- methyl, 3'- thiophosphate
  modified_base 22: mod_base = OTHER; note = 2'- fluoro, 3'- thiophosphate
  modified_base 23: mod_base = OTHER; note = 2'-O- methyl
agtggcgctttgatcatacacag

SEQ ID NO: 346 - RNA, 23 nt, synthetic construct
  source 1..23: mol_type = other RNA
  modified_base 1: mod_base = OTHER; note = 2'-O- methyl, 3'- thiophosphate
  modified_base 2: mod_base = OTHER; note = 2'- fluoro, 3'- thiophosphate
  modified_base 3: mod_base = OTHER; note = 2'-O- methyl
  modified_base 4: mod_base = OTHER; note = 2'- fluoro
  modified_base 5: mod_base = OTHER; note = 2'-O- methyl
  modified_base 6: mod_base = OTHER; note = 2'- fluoro
  modified_base 7: mod_base = OTHER; note = 2'-O- methyl
  modified_base 8: mod_base = OTHER; note = 2'- fluoro
  modified_base 9: mod_base = OTHER; note = 2'-O- methyl
  modified_base 10: mod_base = OTHER; note = 2'- fluoro
  modified_base 11: mod_base = OTHER; note = 2'-O- methyl
  modified_base 12: mod_base = OTHER; note = 2'- fluoro
  modified_base 13: mod_base = OTHER; note = 2'-O- methyl
  modified_base 14: mod_base = OTHER; note = 2'- fluoro
  modified_base 15: mod_base = OTHER; note = 2'-O- methyl
  modified_base 16: mod_base = OTHER; note = 2'- fluoro
  modified_base 17: mod_base = OTHER; note = 2'-O- methyl
  modified_base 18: mod_base = OTHER; note = 2'- fluoro
  modified_base 19: mod_base = OTHER; note = 2'-O- methyl
  modified_base 20: mod_base = OTHER; note = 2'- fluoro
  modified_base 21: mod_base = OTHER; note = 2'-O- methyl, 3'- thiophosphate
  modified_base 22: mod_base = OTHER; note = 2'- fluoro, 3'- thiophosphate
  modified_base 23: mod_base = OTHER; note = 2'-O- methyl
tgcagggcagtggcgctttgatc

SEQ ID NO: 347 - RNA, 23 nt, synthetic construct
  source 1..23: mol_type = other RNA
  modified_base 1: mod_base = OTHER; note = 2'-O- methyl, 3'- thiophosphate
  modified_base 2: mod_base = OTHER; note = 2'- fluoro, 3'- thiophosphate
  modified_base 3: mod_base = OTHER; note = 2'-O- methyl
  modified_base 4: mod_base = OTHER; note = 2'- fluoro
  modified_base 5: mod_base = OTHER; note = 2'-O- methyl
  modified_base 6: mod_base = OTHER; note = 2'- fluoro
  modified_base 7: mod_base = OTHER; note = 2'-O- methyl
  modified_base 8: mod_base = OTHER; note = 2'- fluoro
  modified_base 9: mod_base = OTHER; note = 2'-O- methyl
  modified_base 10: mod_base = OTHER; note = 2'- fluoro
  modified_base 11: mod_base = OTHER; note = 2'-O- methyl
  modified_base 12: mod_base = OTHER; note = 2'- fluoro
  modified_base 13: mod_base = OTHER; note = 2'-O- methyl
  modified_base 14: mod_base = OTHER; note = 2'- fluoro
  modified_base 15: mod_base = OTHER; note = 2'-O- methyl
  modified_base 16: mod_base = OTHER; note = 2'- fluoro
  modified_base 17: mod_base = OTHER; note = 2'-O- methyl
  modified_base 18: mod_base = OTHER; note = 2'- fluoro
  modified_base 19: mod_base = OTHER; note = 2'-O- methyl
  modified_base 20: mod_base = OTHER; note = 2'- fluoro
  modified_base 21: mod_base = OTHER; note = 2'-O- methyl, 3'- thiophosphate
  modified_base 22: mod_base = OTHER; note = 2'- fluoro, 3'- thiophosphate
  modified_base 23: mod_base = OTHER; note = 2'-O- methyl
aagtgcagggcagtggcgctttg

SEQ ID NO: 348 - RNA, 23 nt, synthetic construct
  source 1..23: mol_type = other RNA
  modified_base 1: mod_base = OTHER; note = 2'-O- methyl, 3'- thiophosphate
  modified_base 2: mod_base = OTHER; note = 2'- fluoro, 3'- thiophosphate
  modified_base 3: mod_base = OTHER; note = 2'-O- methyl
  modified_base 4: mod_base = OTHER; note = 2'- fluoro
  modified_base 5: mod_base = OTHER; note = 2'-O- methyl
  modified_base 6: mod_base = OTHER; note = 2'- fluoro
  modified_base 7: mod_base = OTHER; note = 2'-O- methyl
  modified_base 8: mod_base = OTHER; note = 2'- fluoro
  modified_base 9: mod_base = OTHER; note = 2'-O- methyl
  modified_base 10: mod_base = OTHER; note = 2'- fluoro
  modified_base 11: mod_base = OTHER; note = 2'-O- methyl
  modified_base 12: mod_base = OTHER; note = 2'- fluoro
  modified_base 13: mod_base = OTHER; note = 2'-O- methyl
  modified_base 14: mod_base = OTHER; note = 2'- fluoro
  modified_base 15: mod_base = OTHER; note = 2'-O- methyl
  modified_base 16: mod_base = OTHER; note = 2'- fluoro
  modified_base 17: mod_base = OTHER; note = 2'-O- methyl
  modified_base 18: mod_base = OTHER; note = 2'- fluoro
  modified_base 19: mod_base = OTHER; note = 2'-O- methyl
  modified_base 20: mod_base = OTHER; note = 2'- fluoro
  modified_base 21: mod_base = OTHER; note = 2'-O- methyl, 3'- thiophosphate
  modified_base 22: mod_base = OTHER; note = 2'- fluoro, 3'- thiophosphate
  modified_base 23: mod_base = OTHER; note = 2'-O- methyl
aggaagtgcagggcagtggcgct

SEQ ID NO: 349 - RNA, 23 nt, synthetic construct
  source 1..23: mol_type = other RNA
  modified_base 1: mod_base = OTHER; note = 2'-O- methyl, 3'- thiophosphate
  modified_base 2: mod_base = OTHER; note = 2'- fluoro, 3'- thiophosphate
  modified_base 3: mod_base = OTHER; note = 2'-O- methyl
  modified_base 4: mod_base = OTHER; note = 2'- fluoro
  modified_base 5: mod_base = OTHER; note = 2'-O- methyl
  modified_base 6: mod_base = OTHER; note = 2'- fluoro
  modified_base 7: mod_base = OTHER; note = 2'-O- methyl
  modified_base 8: mod_base = OTHER; note = 2'- fluoro
  modified_base 9: mod_base = OTHER; note = 2'-O- methyl
  modified_base 10: mod_base = OTHER; note = 2'- fluoro
  modified_base 11: mod_base = OTHER; note = 2'-O- methyl
  modified_base 12: mod_base = OTHER; note = 2'- fluoro
  modified_base 13: mod_base = OTHER; note = 2'-O- methyl
  modified_base 14: mod_base = OTHER; note = 2'- fluoro
  modified_base 15: mod_base = OTHER; note = 2'-O- methyl
  modified_base 16: mod_base = OTHER; note = 2'- fluoro
  modified_base 17: mod_base = OTHER; note = 2'-O- methyl
  modified_base 18: mod_base = OTHER; note = 2'- fluoro
  modified_base 19: mod_base = OTHER; note = 2'-O- methyl
  modified_base 20: mod_base = OTHER; note = 2'- fluoro
  modified_base 21: mod_base = OTHER; note = 2'-O- methyl, 3'- thiophosphate
  modified_base 22: mod_base = OTHER; note = 2'- fluoro, 3'- thiophosphate
  modified_base 23: mod_base = OTHER; note = 2'-O- methyl
agactgggggtgacacatcgctg

SEQ ID NO: 350 - RNA, 23 nt, synthetic construct
  source 1..23: mol_type = other RNA
  modified_base 1: mod_base = OTHER; note = 2'-O- methyl, 3'- thiophosphate
  modified_base 2: mod_base = OTHER; note = 2'- fluoro, 3'- thiophosphate
  modified_base 3: mod_base = OTHER; note = 2'-O- methyl
  modified_base 4: mod_base = OTHER; note = 2'- fluoro
  modified_base 5: mod_base = OTHER; note = 2'-O- methyl
  modified_base 6: mod_base = OTHER; note = 2'- fluoro
  modified_base 7: mod_base = OTHER; note = 2'-O- methyl
  modified_base 8: mod_base = OTHER; note = 2'- fluoro
  modified_base 9: mod_base = OTHER; note = 2'-O- methyl
  modified_base 10: mod_base = OTHER; note = 2'- fluoro
  modified_base 11: mod_base = OTHER; note = 2'-O- methyl
  modified_base 12: mod_base = OTHER; note = 2'- fluoro
  modified_base 13: mod_base = OTHER; note = 2'-O- methyl
  modified_base 14: mod_base = OTHER; note = 2'- fluoro
  modified_base 15: mod_base = OTHER; note = 2'-O- methyl
  modified_base 16: mod_base = OTHER; note = 2'- fluoro
  modified_base 17: mod_base = OTHER; note = 2'-O- methyl
  modified_base 18: mod_base = OTHER; note = 2'- fluoro
  modified_base 19: mod_base = OTHER; note = 2'-O- methyl
  modified_base 20: mod_base = OTHER; note = 2'- fluoro
  modified_base 21: mod_base = OTHER; note = 2'-O- methyl, 3'- thiophosphate
  modified_base 22: mod_base = OTHER; note = 2'- fluoro, 3'- thiophosphate
  modified_base 23: mod_base = OTHER; note = 2'-O- methyl
tgggagactgggggtgacacatc

SEQ ID NO: 351 - RNA, 23 nt, synthetic construct
  source 1..23: mol_type = other RNA
  modified_base 1: mod_base = OTHER; note = 2'-O- methyl, 3'- thiophosphate
  modified_base 2: mod_base = OTHER; note = 2'- fluoro, 3'- thiophosphate
  modified_base 3: mod_base = OTHER; note = 2'-O- methyl
  modified_base 4: mod_base = OTHER; note = 2'- fluoro
  modified_base 5: mod_base = OTHER; note = 2'-O- methyl
  modified_base 6: mod_base = OTHER; note = 2'- fluoro
  modified_base 7: mod_base = OTHER; note = 2'-O- methyl
  modified_base 8: mod_base = OTHER; note = 2'- fluoro
  modified_base 9: mod_base = OTHER; note = 2'-O- methyl
  modified_base 10: mod_base = OTHER; note = 2'- fluoro
  modified_base 11: mod_base = OTHER; note = 2'-O- methyl
  modified_base 12: mod_base = OTHER; note = 2'- fluoro
  modified_base 13: mod_base = OTHER; note = 2'-O- methyl
  modified_base 14: mod_base = OTHER; note = 2'- fluoro
  modified_base 15: mod_base = OTHER; note = 2'-O- methyl
  modified_base 16: mod_base = OTHER; note = 2'- fluoro
  modified_base 17: mod_base = OTHER; note = 2'-O- methyl
  modified_base 18: mod_base = OTHER; note = 2'- fluoro
  modified_base 19: mod_base = OTHER; note = 2'-O- methyl
  modified_base 20: mod_base = OTHER; note = 2'- fluoro
  modified_base 21: mod_base = OTHER; note = 2'-O- methyl, 3'- thiophosphate
  modified_base 22: mod_base = OTHER; note = 2'- fluoro, 3'- thiophosphate
  modified_base 23: mod_base = OTHER; note = 2'-O- methyl
aggtgggagactgggggtgacac

SEQ ID NO: 352 - RNA, 23 nt, synthetic construct
  source 1..23: mol_type = other RNA
  modified_base 1: mod_base = OTHER; note = 2'-O- methyl, 3'- thiophosphate
  modified_base 2: mod_base = OTHER; note = 2'- fluoro, 3'- thiophosphate
  modified_base 3: mod_base = OTHER; note = 2'-O- methyl
  modified_base 4: mod_base = OTHER; note = 2'- fluoro
  modified_base 5: mod_base = OTHER; note = 2'-O- methyl
  modified_base 6: mod_base = OTHER; note = 2'- fluoro
  modified_base 7: mod_base = OTHER; note = 2'-O- methyl
  modified_base 8: mod_base = OTHER; note = 2'- fluoro
  modified_base 9: mod_base = OTHER; note = 2'-O- methyl
  modified_base 10: mod_base = OTHER; note = 2'- fluoro
  modified_base 11: mod_base = OTHER; note = 2'-O- methyl
  modified_base 12: mod_base = OTHER; note = 2'- fluoro
  modified_base 13: mod_base = OTHER; note = 2'-O- methyl
  modified_base 14: mod_base = OTHER; note = 2'- fluoro
  modified_base 15: mod_base = OTHER; note = 2'-O- methyl
  modified_base 16: mod_base = OTHER; note = 2'- fluoro
  modified_base 17: mod_base = OTHER; note = 2'-O- methyl
  modified_base 18: mod_base = OTHER; note = 2'- fluoro
  modified_base 19: mod_base = OTHER; note = 2'-O- methyl
  modified_base 20: mod_base = OTHER; note = 2'- fluoro
  modified_base 21: mod_base = OTHER; note = 2'-O- methyl, 3'- thiophosphate
  modified_base 22: mod_base = OTHER; note = 2'- fluoro, 3'- thiophosphate
  modified_base 23: mod_base = OTHER; note = 2'-O- methyl
aaggtgggagactgggggtgaca

SEQ ID NO: 353 - RNA, 23 nt, synthetic construct
  source 1..23: mol_type = other RNA
  modified_base 1: mod_base = OTHER; note = 2'-O- methyl, 3'- thiophosphate
  modified_base 2: mod_base = OTHER; note = 2'- fluoro, 3'- thiophosphate
  modified_base 3: mod_base = OTHER; note = 2'-O- methyl
  modified_base 4: mod_base = OTHER; note = 2'- fluoro
  modified_base 5: mod_base = OTHER; note = 2'-O- methyl
  modified_base 6: mod_base = OTHER; note = 2'- fluoro
  modified_base 7: mod_base = OTHER; note = 2'-O- methyl
  modified_base 8: mod_base = OTHER; note = 2'- fluoro
  modified_base 9: mod_base = OTHER; note = 2'-O- methyl
  modified_base 10: mod_base = OTHER; note = 2'- fluoro
  modified_base 11: mod_base = OTHER; note = 2'-O- methyl
  modified_base 12: mod_base = OTHER; note = 2'- fluoro
  modified_base 13: mod_base = OTHER; note = 2'-O- methyl
  modified_base 14: mod_base = OTHER; note = 2'- fluoro
  modified_base 15: mod_base = OTHER; note = 2'-O- methyl
  modified_base 16: mod_base = OTHER; note = 2'- fluoro
  modified_base 17: mod_base = OTHER; note = 2'-O- methyl
  modified_base 18: mod_base = OTHER; note = 2'- fluoro
  modified_base 19: mod_base = OTHER; note = 2'-O- methyl
  modified_base 20: mod_base = OTHER; note = 2'- fluoro
  modified_base 21: mod_base = OTHER; note = 2'-O- methyl, 3'- thiophosphate
  modified_base 22: mod_base = OTHER; note = 2'- fluoro, 3'- thiophosphate
  modified_base 23: mod_base = OTHER; note = 2'-O- methyl
aaaaggtgggagactgggggtga

SEQ ID NO: 354 - RNA, 23 nt, synthetic construct
  source 1..23: mol_type = other RNA
  modified_base 1: mod_base = OTHER; note = 2'-O- methyl, 3'- thiophosphate
  modified_base 2: mod_base = OTHER; note = 2'- fluoro, 3'- thiophosphate
  modified_base 3: mod_base = OTHER; note = 2'-O- methyl
  modified_base 4: mod_base = OTHER; note = 2'- fluoro
  modified_base 5: mod_base = OTHER; note = 2'-O- methyl
  modified_base 6: mod_base = OTHER; note = 2'- fluoro
  modified_base 7: mod_base = OTHER; note = 2'-O- methyl
  modified_base 8: mod_base = OTHER; note = 2'- fluoro
  modified_base 9: mod_base = OTHER; note = 2'-O- methyl
  modified_base 10: mod_base = OTHER; note = 2'- fluoro
  modified_base 11: mod_base = OTHER; note = 2'-O- methyl
  modified_base 12: mod_base = OTHER; note = 2'- fluoro
  modified_base 13: mod_base = OTHER; note = 2'-O- methyl
  modified_base 14: mod_base = OTHER; note = 2'- fluoro
  modified_base 15: mod_base = OTHER; note = 2'-O- methyl
  modified_base 16: mod_base = OTHER; note = 2'- fluoro
  modified_base 17: mod_base = OTHER; note = 2'-O- methyl
  modified_base 18: mod_base = OTHER; note = 2'- fluoro
  modified_base 19: mod_base = OTHER; note = 2'-O- methyl
  modified_base 20: mod_base = OTHER; note = 2'- fluoro
  modified_base 21: mod_base = OTHER; note = 2'-O- methyl, 3'- thiophosphate
  modified_base 22: mod_base = OTHER; note = 2'- fluoro, 3'- thiophosphate
  modified_base 23: mod_base = OTHER; note = 2'-O- methyl
tccagctcaaagtcgactcatta

SEQ ID NO: 355 - RNA, 23 nt, synthetic construct
  source 1..23: mol_type = other RNA
  modified_base 1: mod_base = OTHER; note = 2'-O- methyl, 3'- thiophosphate
  modified_base 2: mod_base = OTHER; note = 2'- fluoro, 3'- thiophosphate
  modified_base 3: mod_base = OTHER; note = 2'-O- methyl
  modified_base 4: mod_base = OTHER; note = 2'- fluoro
  modified_base 5: mod_base = OTHER; note = 2'-O- methyl
  modified_base 6: mod_base = OTHER; note = 2'- fluoro
  modified_base 7: mod_base = OTHER; note = 2'-O- methyl
  modified_base 8: mod_base = OTHER; note = 2'- fluoro
  modified_base 9: mod_base = OTHER; note = 2'-O- methyl
  modified_base 10: mod_base = OTHER; note = 2'- fluoro
  modified_base 11: mod_base = OTHER; note = 2'-O- methyl
  modified_base 12: mod_base = OTHER; note = 2'- fluoro
  modified_base 13: mod_base = OTHER; note = 2'-O- methyl
  modified_base 14: mod_base = OTHER; note = 2'- fluoro
  modified_base 15: mod_base = OTHER; note = 2'-O- methyl
  modified_base 16: mod_base = OTHER; note = 2'- fluoro
  modified_base 17: mod_base = OTHER; note = 2'-O- methyl
  modified_base 18: mod_base = OTHER; note = 2'- fluoro
  modified_base 19: mod_base = OTHER; note = 2'-O- methyl
  modified_base 20: mod_base = OTHER; note = 2'- fluoro
  modified_base 21: mod_base = OTHER; note = 2'-O- methyl, 3'- thiophosphate
  modified_base 22: mod_base = OTHER; note = 2'- fluoro, 3'- thiophosphate
  modified_base 23: mod_base = OTHER; note = 2'-O- methyl
ttccagctcaaagtcgactcatt

SEQ ID NO: 356 - RNA, 23 nt, synthetic construct
  source 1..23: mol_type = other RNA
  modified_base 1: mod_base = OTHER; note = 2'-O- methyl, 3'- thiophosphate
  modified_base 2: mod_base = OTHER; note = 2'- fluoro, 3'- thiophosphate
  modified_base 3: mod_base = OTHER; note = 2'-O- methyl
  modified_base 4: mod_base = OTHER; note = 2'- fluoro
  modified_base 5: mod_base = OTHER; note = 2'-O- methyl
  modified_base 6: mod_base = OTHER; note = 2'- fluoro
  modified_base 7: mod_base = OTHER; note = 2'-O- methyl
  modified_base 8: mod_base = OTHER; note = 2'- fluoro
  modified_base 9: mod_base = OTHER; note = 2'-O- methyl
  modified_base 10: mod_base = OTHER; note = 2'- fluoro
  modified_base 11: mod_base = OTHER; note = 2'-O- methyl
  modified_base 12: mod_base = OTHER; note = 2'- fluoro
  modified_base 13: mod_base = OTHER; note = 2'-O- methyl
  modified_base 14: mod_base = OTHER; note = 2'- fluoro
  modified_base 15: mod_base = OTHER; note = 2'-O- methyl
  modified_base 16: mod_base = OTHER; note = 2'- fluoro
  modified_base 17: mod_base = OTHER; note = 2'-O- methyl
  modified_base 18: mod_base = OTHER; note = 2'- fluoro
  modified_base 19: mod_base = OTHER; note = 2'-O- methyl
  modified_base 20: mod_base = OTHER; note = 2'- fluoro
  modified_base 21: mod_base = OTHER; note = 2'-O- methyl, 3'- thiophosphate
  modified_base 22: mod_base = OTHER; note = 2'- fluoro, 3'- thiophosphate
  modified_base 23: mod_base = OTHER; note = 2'-O- methyl
tttccagctcaaagtcgactcat

SEQ ID NO: 357 - RNA, 23 nt, synthetic construct
  source 1..23: mol_type = other RNA
  modified_base 1: mod_base = OTHER; note = 2'-O- methyl, 3'- thiophosphate
  modified_base 2: mod_base = OTHER; note = 2'- fluoro, 3'- thiophosphate
  modified_base 3: mod_base = OTHER; note = 2'-O- methyl
  modified_base 4: mod_base = OTHER; note = 2'- fluoro
  modified_base 5: mod_base = OTHER; note = 2'-O- methyl
  modified_base 6: mod_base = OTHER; note = 2'- fluoro
  modified_base 7: mod_base = OTHER; note = 2'-O- methyl
  modified_base 8: mod_base = OTHER; note = 2'- fluoro
  modified_base 9: mod_base = OTHER; note = 2'-O- methyl
  modified_base 10: mod_base = OTHER; note = 2'- fluoro
  modified_base 11: mod_base = OTHER; note = 2'-O- methyl
  modified_base 12: mod_base = OTHER; note = 2'- fluoro
  modified_base 13: mod_base = OTHER; note = 2'-O- methyl
  modified_base 14: mod_base = OTHER; note = 2'- fluoro
  modified_base 15: mod_base = OTHER; note = 2'-O- methyl
  modified_base 16: mod_base = OTHER; note = 2'- fluoro
  modified_base 17: mod_base = OTHER; note = 2'-O- methyl
  modified_base 18: mod_base = OTHER; note = 2'- fluoro
  modified_base 19: mod_base = OTHER; note = 2'-O- methyl
  modified_base 20: mod_base = OTHER; note = 2'- fluoro
  modified_base 21: mod_base = OTHER; note = 2'-O- methyl, 3'- thiophosphate
  modified_base 22: mod_base = OTHER; note = 2'- fluoro, 3'- thiophosphate
  modified_base 23: mod_base = OTHER; note = 2'-O- methyl
tgctttccagctcaaagtcgact

SEQ ID NO: 358 - RNA, 23 nt, synthetic construct
  source 1..23: mol_type = other RNA
  modified_base 1: mod_base = OTHER; note = 2'-O- methyl, 3'- thiophosphate
  modified_base 2: mod_base = OTHER; note = 2'- fluoro, 3'- thiophosphate
  modified_base 3: mod_base = OTHER; note = 2'-O- methyl
  modified_base 4: mod_base = OTHER; note = 2'- fluoro
  modified_base 5: mod_base = OTHER; note = 2'-O- methyl
  modified_base 6: mod_base = OTHER; note = 2'- fluoro
  modified_base 7: mod_base = OTHER; note = 2'-O- methyl
  modified_base 8: mod_base = OTHER; note = 2'- fluoro
  modified_base 9: mod_base = OTHER; note = 2'-O- methyl
  modified_base 10: mod_base = OTHER; note = 2'- fluoro
  modified_base 11: mod_base = OTHER; note = 2'-O- methyl
  modified_base 12: mod_base = OTHER; note = 2'- fluoro
  modified_base 13: mod_base = OTHER; note = 2'-O- methyl
  modified_base 14: mod_base = OTHER; note = 2'- fluoro
  modified_base 15: mod_base = OTHER; note = 2'-O- methyl
  modified_base 16: mod_base = OTHER; note = 2'- fluoro
  modified_base 17: mod_base = OTHER; note = 2'-O- methyl
  modified_base 18: mod_base = OTHER; note = 2'- fluoro
  modified_base 19: mod_base = OTHER; note = 2'-O- methyl
  modified_base 20: mod_base = OTHER; note = 2'- fluoro
  modified_base 21: mod_base = OTHER; note = 2'-O- methyl, 3'- thiophosphate
  modified_base 22: mod_base = OTHER; note = 2'- fluoro, 3'- thiophosphate
  modified_base 23: mod_base = OTHER; note = 2'-O- methyl
aacggctgctttccagctcaaag

SEQ ID NO: 359 - RNA, 23 nt, synthetic construct
  source 1..23: mol_type = other RNA
  modified_base 1: mod_base = OTHER; note = 2'-O- methyl, 3'- thiophosphate
  modified_base 2: mod_base = OTHER; note = 2'- fluoro, 3'- thiophosphate
  modified_base 3: mod_base = OTHER; note = 2'-O- methyl
  modified_base 4: mod_base = OTHER; note = 2'- fluoro
  modified_base 5: mod_base = OTHER; note = 2'-O- methyl
  modified_base 6: mod_base = OTHER; note = 2'- fluoro
  modified_base 7: mod_base = OTHER; note = 2'-O- methyl
  modified_base 8: mod_base = OTHER; note = 2'- fluoro
  modified_base 9: mod_base = OTHER; note = 2'-O- methyl
  modified_base 10: mod_base = OTHER; note = 2'- fluoro
  modified_base 11: mod_base = OTHER; note = 2'-O- methyl
  modified_base 12: mod_base = OTHER; note = 2'- fluoro
  modified_base 13: mod_base = OTHER; note = 2'-O- methyl
  modified_base 14: mod_base = OTHER; note = 2'- fluoro
  modified_base 15: mod_base = OTHER; note = 2'-O- methyl
  modified_base 16: mod_base = OTHER; note = 2'- fluoro
  modified_base 17: mod_base = OTHER; note = 2'-O- methyl
  modified_base 18: mod_base = OTHER; note = 2'- fluoro
  modified_base 19: mod_base = OTHER; note = 2'-O- methyl
  modified_base 20: mod_base = OTHER; note = 2'- fluoro
  modified_base 21: mod_base = OTHER; note = 2'-O- methyl, 3'- thiophosphate
  modified_base 22: mod_base = OTHER; note = 2'- fluoro, 3'- thiophosphate
  modified_base 23: mod_base = OTHER; note = 2'-O- methyl
aaacggctgctttccagctcaaa

SEQ ID NO: 360 - RNA, 23 nt, synthetic construct
  source 1..23: mol_type = other RNA
  modified_base 1: mod_base = OTHER; note = 2'-O- methyl, 3'- thiophosphate
  modified_base 2: mod_base = OTHER; note = 2'- fluoro, 3'- thiophosphate
  modified_base 3: mod_base = OTHER; note = 2'-O- methyl
  modified_base 4: mod_base = OTHER; note = 2'- fluoro
  modified_base 5: mod_base = OTHER; note = 2'-O- methyl
  modified_base 6: mod_base = OTHER; note = 2'- fluoro
  modified_base 7: mod_base = OTHER; note = 2'-O- methyl
  modified_base 8: mod_base = OTHER; note = 2'- fluoro
  modified_base 9: mod_base = OTHER; note = 2'-O- methyl
  modified_base 10: mod_base = OTHER; note = 2'- fluoro
  modified_base 11: mod_base = OTHER; note = 2'-O- methyl
  modified_base 12: mod_base = OTHER; note = 2'- fluoro
  modified_base 13: mod_base = OTHER; note = 2'-O- methyl
  modified_base 14: mod_base = OTHER; note = 2'- fluoro
  modified_base 15: mod_base = OTHER; note = 2'-O- methyl
  modified_base 16: mod_base = OTHER; note = 2'- fluoro
  modified_base 17: mod_base = OTHER; note = 2'-O- methyl
  modified_base 18: mod_base = OTHER; note = 2'- fluoro
  modified_base 19: mod_base = OTHER; note = 2'-O- methyl
  modified_base 20: mod_base = OTHER; note = 2'- fluoro
  modified_base 21: mod_base = OTHER; note = 2'-O- methyl, 3'- thiophosphate
  modified_base 22: mod_base = OTHER; note = 2'- fluoro, 3'- thiophosphate
  modified_base 23: mod_base = OTHER; note = 2'-O- methyl
aggagaaacggctgctttccagc

SEQ ID NO: 361 - RNA, 23 nt, synthetic construct
  source 1..23: mol_type = other RNA
  modified_base 1: mod_base = OTHER; note = 2'-O- methyl, 3'- thiophosphate
  modified_base 2: mod_base = OTHER; note = 2'- fluoro, 3'- thiophosphate
  modified_base 3: mod_base = OTHER; note = 2'-O- methyl
  modified_base 4: mod_base = OTHER; note = 2'- fluoro
  modified_base 5: mod_base = OTHER; note = 2'-O- methyl
  modified_base 6: mod_base = OTHER; note = 2'- fluoro
  modified_base 7: mod_base = OTHER; note = 2'-O- methyl
  modified_base 8: mod_base = OTHER; note = 2'- fluoro
  modified_base 9: mod_base = OTHER; note = 2'-O- methyl
  modified_base 10: mod_base = OTHER; note = 2'- fluoro
  modified_base 11: mod_base = OTHER; note = 2'-O- methyl
  modified_base 12: mod_base = OTHER; note = 2'- fluoro
  modified_base 13: mod_base = OTHER; note = 2'-O- methyl
  modified_base 14: mod_base = OTHER; note = 2'- fluoro
  modified_base 15: mod_base = OTHER; note = 2'-O- methyl
  modified_base 16: mod_base = OTHER; note = 2'- fluoro
  modified_base 17: mod_base = OTHER; note = 2'-O- methyl
  modified_base 18: mod_base = OTHER; note = 2'- fluoro
  modified_base 19: mod_base = OTHER; note = 2'-O- methyl
  modified_base 20: mod_base = OTHER; note = 2'- fluoro
  modified_base 21: mod_base = OTHER; note = 2'-O- methyl, 3'- thiophosphate
  modified_base 22: mod_base = OTHER; note = 2'- fluoro, 3'- thiophosphate
  modified_base 23: mod_base = OTHER; note = 2'-O- methyl
accaaggagaaacggctgctttc

SEQ ID NO: 362 - RNA, 23 nt, synthetic construct
  source 1..23: mol_type = other RNA
  modified_base 1: mod_base = OTHER; note = 2'-O- methyl, 3'- thiophosphate
  modified_base 2: mod_base = OTHER; note = 2'- fluoro, 3'- thiophosphate
  modified_base 3: mod_base = OTHER; note = 2'-O- methyl
  modified_base 4: mod_base = OTHER; note = 2'- fluoro
  modified_base 5: mod_base = OTHER; note = 2'-O- methyl
  modified_base 6: mod_base = OTHER; note = 2'- fluoro
  modified_base 7: mod_base = OTHER; note = 2'-O- methyl
  modified_base 8: mod_base = OTHER; note = 2'- fluoro
  modified_base 9: mod_base = OTHER; note = 2'-O- methyl
  modified_base 10: mod_base = OTHER; note = 2'- fluoro
  modified_base 11: mod_base = OTHER; note = 2'-O- methyl
  modified_base 12: mod_base = OTHER; note = 2'- fluoro
  modified_base 13: mod_base = OTHER; note = 2'-O- methyl
  modified_base 14: mod_base = OTHER; note = 2'- fluoro
  modified_base 15: mod_base = OTHER; note = 2'-O- methyl
  modified_base 16: mod_base = OTHER; note = 2'- fluoro
  modified_base 17: mod_base = OTHER; note = 2'-O- methyl
  modified_base 18: mod_base = OTHER; note = 2'- fluoro
  modified_base 19: mod_base = OTHER; note = 2'-O- methyl
  modified_base 20: mod_base = OTHER; note = 2'- fluoro
  modified_base 21: mod_base = OTHER; note = 2'-O- methyl, 3'- thiophosphate
  modified_base 22: mod_base = OTHER; note = 2'- fluoro, 3'- thiophosphate
  modified_base 23: mod_base = OTHER; note = 2'-O- methyl
tacaaacaagctggtcggttgga

SEQ ID NO: 363 - RNA, 23 nt, synthetic construct
  source 1..23: mol_type = other RNA
  modified_base 1: mod_base = OTHER; note = 2'-O- methyl, 3'- thiophosphate
  modified_base 2: mod_base = OTHER; note = 2'- fluoro, 3'- thiophosphate
  modified_base 3: mod_base = OTHER; note = 2'-O- methyl
  modified_base 4: mod_base = OTHER; note = 2'- fluoro
  modified_base 5: mod_base = OTHER; note = 2'-O- methyl
  modified_base 6: mod_base = OTHER; note = 2'- fluoro
  modified_base 7: mod_base = OTHER; note = 2'-O- methyl
  modified_base 8: mod_base = OTHER; note = 2'- fluoro
  modified_base 9: mod_base = OTHER; note = 2'-O- methyl
  modified_base 10: mod_base = OTHER; note = 2'- fluoro
  modified_base 11: mod_base = OTHER; note = 2'-O- methyl
  modified_base 12: mod_base = OTHER; note = 2'- fluoro
  modified_base 13: mod_base = OTHER; note = 2'-O- methyl
  modified_base 14: mod_base = OTHER; note = 2'- fluoro
  modified_base 15: mod_base = OTHER; note = 2'-O- methyl
  modified_base 16: mod_base = OTHER; note = 2'- fluoro
  modified_base 17: mod_base = OTHER; note = 2'-O- methyl
  modified_base 18: mod_base = OTHER; note = 2'- fluoro
  modified_base 19: mod_base = OTHER; note = 2'-O- methyl
  modified_base 20: mod_base = OTHER; note = 2'- fluoro
  modified_base 21: mod_base = OTHER; note = 2'-O- methyl, 3'- thiophosphate
  modified_base 22: mod_base = OTHER; note = 2'- fluoro, 3'- thiophosphate
  modified_base 23: mod_base = OTHER; note = 2'-O- methyl
aacacttttttgtttcacaaaca

SEQ ID NO: 364 - RNA, 23 nt, synthetic construct
  source 1..23: mol_type = other RNA
  modified_base 1: mod_base = OTHER; note = 2'-O- methyl, 3'- thiophosphate
  modified_base 2: mod_base = OTHER; note = 2'- fluoro, 3'- thiophosphate
  modified_base 3: mod_base = OTHER; note = 2'-O- methyl
  modified_base 4: mod_base = OTHER; note = 2'- fluoro
  modified_base 5: mod_base = OTHER; note = 2'-O- methyl
  modified_base 6: mod_base = OTHER; note = 2'- fluoro
  modified_base 7: mod_base = OTHER; note = 2'-O- methyl
  modified_base 8: mod_base = OTHER; note = 2'- fluoro
  modified_base 9: mod_base = OTHER; note = 2'-O- methyl
  modified_base 10: mod_base = OTHER; note = 2'- fluoro
  modified_base 11: mod_base = OTHER; note = 2'-O- methyl
  modified_base 12: mod_base = OTHER; note = 2'- fluoro
  modified_base 13: mod_base = OTHER; note = 2'-O- methyl
  modified_base 14: mod_base = OTHER; note = 2'- fluoro
  modified_base 15: mod_base = OTHER; note = 2'-O- methyl
  modified_base 16: mod_base = OTHER; note = 2'- fluoro
  modified_base 17: mod_base = OTHER; note = 2'-O- methyl
  modified_base 18: mod_base = OTHER; note = 2'- fluoro
  modified_base 19: mod_base = OTHER; note = 2'-O- methyl
  modified_base 20: mod_base = OTHER; note = 2'- fluoro
  modified_base 21: mod_base = OTHER; note = 2'-O- methyl, 3'- thiophosphate
  modified_base 22: mod_base = OTHER; note = 2'- fluoro, 3'- thiophosphate
  modified_base 23: mod_base = OTHER; note = 2'-O- methyl
aaagggaacacttttttgtttca

SEQ ID NO: 365 - RNA, 22 nt, synthetic construct
  source 1..22: mol_type = other RNA
  modified_base 1: mod_base = OTHER; note = 2'-O- methyl, 3'- thiophosphate
  modified_base 2: mod_base = OTHER; note = 2'- fluoro, 3'- thiophosphate
  modified_base 3: mod_base = OTHER; note = 2'-O- methyl
  modified_base 4: mod_base = OTHER; note = 2'- fluoro
  modified_base 5: mod_base = OTHER; note = 2'-O- methyl
  modified_base 6: mod_base = OTHER; note = 2'- fluoro
  modified_base 7: mod_base = OTHER; note = 2'-O- methyl
  modified_base 8: mod_base = OTHER; note = 2'- fluoro
  modified_base 9: mod_base = OTHER; note = 2'-O- methyl
  modified_base 10: mod_base = OTHER; note = 2'- fluoro
  modified_base 11: mod_base = OTHER; note = 2'-O- methyl
  modified_base 12: mod_base = OTHER; note = 2'- fluoro
  modified_base 13: mod_base = OTHER; note = 2'-O- methyl
  modified_base 14: mod_base = OTHER; note = 2'- fluoro
  modified_base 15: mod_base = OTHER; note = 2'-O- methyl
  modified_base 16: mod_base = OTHER; note = 2'- fluoro
  modified_base 17: mod_base = OTHER; note = 2'-O- methyl
  modified_base 18: mod_base = OTHER; note = 2'- fluoro
  modified_base 19: mod_base = OTHER; note = 2'-O- methyl
  modified_base 20: mod_base = OTHER; note = 2'- fluoro, 3'- thiophosphate
  modified_base 21: mod_base = OTHER; note = 2'-O- methyl, 3'- thiophosphate
  modified_base 22: mod_base = OTHER; note = 2'- fluoro
aaaagggaacacttttttgttt

SEQ ID NO: 366 - RNA, 23 nt, synthetic construct
  source 1..23: mol_type = other RNA
  modified_base 1: mod_base = OTHER; note = 2'-O- methyl, 3'- thiophosphate
  modified_base 2: mod_base = OTHER; note = 2'- fluoro, 3'- thiophosphate
  modified_base 3: mod_base = OTHER; note = 2'-O- methyl
  modified_base 4: mod_base = OTHER; note = 2'- fluoro
  modified_base 5: mod_base = OTHER; note = 2'-O- methyl
  modified_base 6: mod_base = OTHER; note = 2'- fluoro
  modified_base 7: mod_base = OTHER; note = 2'-O- methyl
  modified_base 8: mod_base = OTHER; note = 2'- fluoro
  modified_base 9: mod_base = OTHER; note = 2'-O- methyl
  modified_base 10: mod_base = OTHER; note = 2'- fluoro
  modified_base 11: mod_base = OTHER; note = 2'-O- methyl
  modified_base 12: mod_base = OTHER; note = 2'- fluoro
  modified_base 13: mod_base = OTHER; note = 2'-O- methyl
  modified_base 14: mod_base = OTHER; note = 2'- fluoro
  modified_base 15: mod_base = OTHER; note = 2'-O- methyl
  modified_base 16: mod_base = OTHER; note = 2'- fluoro
  modified_base 17: mod_base = OTHER; note = 2'-O- methyl
  modified_base 18: mod_base = OTHER; note = 2'- fluoro
  modified_base 19: mod_base = OTHER; note = 2'-O- methyl
  modified_base 20: mod_base = OTHER; note = 2'- fluoro
  modified_base 21: mod_base = OTHER; note = 2'-O- methyl, 3'- thiophosphate
  modified_base 22: mod_base = OTHER; note = 2'- fluoro, 3'- thiophosphate
  modified_base 23: mod_base = OTHER; note = 2'-O- methyl
tgaaaagggaacacttttttgtt

SEQ ID NO: 367 - RNA, 23 nt, synthetic construct
  source 1..23: mol_type = other RNA
  modified_base 1: mod_base = OTHER; note = 2'-O- methyl, 3'- thiophosphate
  modified_base 2: mod_base = OTHER; note = 2'- fluoro, 3'- thiophosphate
  modified_base 3: mod_base = OTHER; note = 2'-O- methyl
  modified_base 4: mod_base = OTHER; note = 2'- fluoro
  modified_base 5: mod_base = OTHER; note = 2'-O- methyl
  modified_base 6: mod_base = OTHER; note = 2'- fluoro
  modified_base 7: mod_base = OTHER; note = 2'-O- methyl
  modified_base 8: mod_base = OTHER; note = 2'- fluoro
  modified_base 9: mod_base = OTHER; note = 2'-O- methyl
  modified_base 10: mod_base = OTHER; note = 2'- fluoro
  modified_base 11: mod_base = OTHER; note = 2'-O- methyl
  modified_base 12: mod_base = OTHER; note = 2'- fluoro
  modified_base 13: mod_base = OTHER; note = 2'-O- methyl
  modified_base 14: mod_base = OTHER; note = 2'- fluoro
  modified_base 15: mod_base = OTHER; note = 2'-O- methyl
  modified_base 16: mod_base = OTHER; note = 2'- fluoro
  modified_base 17: mod_base = OTHER; note = 2'-O- methyl
  modified_base 18: mod_base = OTHER; note = 2'- fluoro
  modified_base 19: mod_base = OTHER; note = 2'-O- methyl
  modified_base 20: mod_base = OTHER; note = 2'- fluoro
  modified_base 21: mod_base = OTHER; note = 2'-O- methyl, 3'- thiophosphate
  modified_base 22: mod_base = OTHER; note = 2'- fluoro, 3'- thiophosphate
  modified_base 23: mod_base = OTHER; note = 2'-O- methyl
tgttctcaacttgaaaagggaac

SEQ ID NO: 368 - RNA, 23 nt, synthetic construct
  source 1..23: mol_type = other RNA
  modified_base 1: mod_base = OTHER; note = 2'-O- methyl, 3'- thiophosphate
  modified_base 2: mod_base = OTHER; note = 2'- fluoro, 3'- thiophosphate
  modified_base 3: mod_base = OTHER; note = 2'-O- methyl
  modified_base 4: mod_base = OTHER; note = 2'- fluoro
  modified_base 5: mod_base = OTHER; note = 2'-O- methyl
  modified_base 6: mod_base = OTHER; note = 2'- fluoro
  modified_base 7: mod_base = OTHER; note = 2'-O- methyl
  modified_base 8: mod_base = OTHER; note = 2'- fluoro
  modified_base 9: mod_base = OTHER; note = 2'-O- methyl
  modified_base 10: mod_base = OTHER; note = 2'- fluoro
  modified_base 11: mod_base = OTHER; note = 2'-O- methyl
  modified_base 12: mod_base = OTHER; note = 2'- fluoro
  modified_base 13: mod_base = OTHER; note = 2'-O- methyl
  modified_base 14: mod_base = OTHER; note = 2'- fluoro
  modified_base 15: mod_base = OTHER; note = 2'-O- methyl
  modified_base 16: mod_base = OTHER; note = 2'- fluoro
  modified_base 17: mod_base = OTHER; note = 2'-O- methyl
  modified_base 18: mod_base = OTHER; note = 2'- fluoro
  modified_base 19: mod_base = OTHER; note = 2'-O- methyl
  modified_base 20: mod_base = OTHER; note = 2'- fluoro
  modified_base 21: mod_base = OTHER; note = 2'-O- methyl, 3'- thiophosphate
  modified_base 22: mod_base = OTHER; note = 2'- fluoro, 3'- thiophosphate
  modified_base 23: mod_base = OTHER; note = 2'-O- methyl
ttgttctcaacttgaaaagggaa

SEQ ID NO: 369 - RNA, 23 nt, synthetic construct
  source 1..23: mol_type = other RNA
  modified_base 1: mod_base = OTHER; note = 2'-O- methyl, 3'- thiophosphate
  modified_base 2: mod_base = OTHER; note = 2'- fluoro, 3'- thiophosphate
  modified_base 3: mod_base = OTHER; note = 2'-O- methyl
  modified_base 4: mod_base = OTHER; note = 2'- fluoro
  modified_base 5: mod_base = OTHER; note = 2'-O- methyl
  modified_base 6: mod_base = OTHER; note = 2'- fluoro
  modified_base 7: mod_base = OTHER; note = 2'-O- methyl
  modified_base 8: mod_base = OTHER; note = 2'- fluoro
  modified_base 9: mod_base = OTHER; note = 2'-O- methyl
  modified_base 10: mod_base = OTHER; note = 2'- fluoro
  modified_base 11: mod_base = OTHER; note = 2'-O- methyl
  modified_base 12: mod_base = OTHER; note = 2'- fluoro
  modified_base 13: mod_base = OTHER; note = 2'-O- methyl
  modified_base 14: mod_base = OTHER; note = 2'- fluoro
  modified_base 15: mod_base = OTHER; note = 2'-O- methyl
  modified_base 16: mod_base = OTHER; note = 2'- fluoro
  modified_base 17: mod_base = OTHER; note = 2'-O- methyl
  modified_base 18: mod_base = OTHER; note = 2'- fluoro
  modified_base 19: mod_base = OTHER; note = 2'-O- methyl
  modified_base 20: mod_base = OTHER; note = 2'- fluoro
  modified_base 21: mod_base = OTHER; note = 2'-O- methyl, 3'- thiophosphate
  modified_base 22: mod_base = OTHER; note = 2'- fluoro, 3'- thiophosphate
  modified_base 23: mod_base = OTHER; note = 2'-O- methyl
tttttgttctcaacttgaaaagg

SEQ ID NO: 370 - RNA, 23 nt, synthetic construct
  source 1..23: mol_type = other RNA
  modified_base 1: mod_base = OTHER; note = 2'-O- methyl, 3'- thiophosphate
  modified_base 2: mod_base = OTHER; note = 2'- fluoro, 3'- thiophosphate
  modified_base 3: mod_base = OTHER; note = 2'-O- methyl
  modified_base 4: mod_base = OTHER; note = 2'- fluoro
  modified_base 5: mod_base = OTHER; note = 2'-O- methyl
  modified_base 6: mod_base = OTHER; note = 2'- fluoro
  modified_base 7: mod_base = OTHER; note = 2'-O- methyl
  modified_base 8: mod_base = OTHER; note = 2'- fluoro
  modified_base 9: mod_base = OTHER; note = 2'-O- methyl
  modified_base 10: mod_base = OTHER; note = 2'- fluoro
  modified_base 11: mod_base = OTHER; note = 2'-O- methyl
  modified_base 12: mod_base = OTHER; note = 2'- fluoro
  modified_base 13: mod_base = OTHER; note = 2'-O- methyl
  modified_base 14: mod_base = OTHER; note = 2'- fluoro
  modified_base 15: mod_base = OTHER; note = 2'-O- methyl
  modified_base 16: mod_base = OTHER; note = 2'- fluoro
  modified_base 17: mod_base = OTHER; note = 2'-O- methyl
  modified_base 18: mod_base = OTHER; note = 2'- fluoro
  modified_base 19: mod_base = OTHER; note = 2'-O- methyl
  modified_base 20: mod_base = OTHER; note = 2'- fluoro
  modified_base 21: mod_base = OTHER; note = 2'-O- methyl, 3'- thiophosphate
  modified_base 22: mod_base = OTHER; note = 2'- fluoro, 3'- thiophosphate
  modified_base 23: mod_base = OTHER; note = 2'-O- methyl
atttttgttctcaacttgaaaag

SEQ ID NO: 371 - RNA, 23 nt, synthetic construct
  source 1..23: mol_type = other RNA
  modified_base 1: mod_base = OTHER; note = 2'-O- methyl, 3'- thiophosphate
  modified_base 2: mod_base = OTHER; note = 2'- fluoro, 3'- thiophosphate
  modified_base 3: mod_base = OTHER; note = 2'-O- methyl
  modified_base 4: mod_base = OTHER; note = 2'- fluoro
  modified_base 5: mod_base = OTHER; note = 2'-O- methyl
  modified_base 6: mod_base = OTHER; note = 2'- fluoro
  modified_base 7: mod_base = OTHER; note = 2'-O- methyl
  modified_base 8: mod_base = OTHER; note = 2'- fluoro
  modified_base 9: mod_base = OTHER; note = 2'-O- methyl
  modified_base 10: mod_base = OTHER; note = 2'- fluoro
  modified_base 11: mod_base = OTHER; note = 2'-O- methyl
  modified_base 12: mod_base = OTHER; note = 2'- fluoro
  modified_base 13: mod_base = OTHER; note = 2'-O- methyl
  modified_base 14: mod_base = OTHER; note = 2'- fluoro
  modified_base 15: mod_base = OTHER; note = 2'-O- methyl
  modified_base 16: mod_base = OTHER; note = 2'- fluoro
  modified_base 17: mod_base = OTHER; note = 2'-O- methyl
  modified_base 18: mod_base = OTHER; note = 2'- fluoro
  modified_base 19: mod_base = OTHER; note = 2'-O- methyl
  modified_base 20: mod_base = OTHER; note = 2'- fluoro
  modified_base 21: mod_base = OTHER; note = 2'-O- methyl, 3'- thiophosphate
  modified_base 22: mod_base = OTHER; note = 2'- fluoro, 3'- thiophosphate
  modified_base 23: mod_base = OTHER; note = 2'-O- methyl
caatttttgttctcaacttgaaa

SEQ ID NO: 372 - RNA, 23 nt, synthetic construct
  source 1..23: mol_type = other RNA
  modified_base 1: mod_base = OTHER; note = 2'-O- methyl, 3'- thiophosphate
  modified_base 2: mod_base = OTHER; note = 2'- fluoro, 3'- thiophosphate
  modified_base 3: mod_base = OTHER; note = 2'-O- methyl
  modified_base 4: mod_base = OTHER; note = 2'- fluoro
  modified_base 5: mod_base = OTHER; note = 2'-O- methyl
  modified_base 6: mod_base = OTHER; note = 2'- fluoro
  modified_base 7: mod_base = OTHER; note = 2'-O- methyl
  modified_base 8: mod_base = OTHER; note = 2'- fluoro
  modified_base 9: mod_base = OTHER; note = 2'-O- methyl
  modified_base 10: mod_base = OTHER; note = 2'- fluoro
  modified_base 11: mod_base = OTHER; note = 2'-O- methyl
  modified_base 12: mod_base = OTHER; note = 2'- fluoro
  modified_base 13: mod_base = OTHER; note = 2'-O- methyl
  modified_base 14: mod_base = OTHER; note = 2'- fluoro
  modified_base 15: mod_base = OTHER; note = 2'-O- methyl
  modified_base 16: mod_base = OTHER; note = 2'- fluoro
  modified_base 17: mod_base = OTHER; note = 2'-O- methyl
  modified_base 18: mod_base = OTHER; note = 2'- fluoro
  modified_base 19: mod_base = OTHER; note = 2'-O- methyl
  modified_base 20: mod_base = OTHER; note = 2'- fluoro
  modified_base 21: mod_base = OTHER; note = 2'-O- methyl, 3'- thiophosphate
  modified_base 22: mod_base = OTHER; note = 2'- fluoro, 3'- thiophosphate
  modified_base 23: mod_base = OTHER; note = 2'-O- methyl
attttaaaacccaatttttgttc

SEQ ID NO: 373 - RNA, 22 nt, synthetic construct
  source 1..22: mol_type = other RNA
  modified_base 1: mod_base = OTHER; note = 2'-O- methyl, 3'- thiophosphate
  modified_base 2: mod_base = OTHER; note = 2'- fluoro, 3'- thiophosphate
  modified_base 3: mod_base = OTHER; note = 2'-O- methyl
  modified_base 4: mod_base = OTHER; note = 2'- fluoro
  modified_base 5: mod_base = OTHER; note = 2'-O- methyl
  modified_base 6: mod_base = OTHER; note = 2'- fluoro
  modified_base 7: mod_base = OTHER; note = 2'-O- methyl
  modified_base 8: mod_base = OTHER; note = 2'- fluoro
  modified_base 9: mod_base = OTHER; note = 2'-O- methyl
  modified_base 10: mod_base = OTHER; note = 2'- fluoro
  modified_base 11: mod_base = OTHER; note = 2'-O- methyl
  modified_base 12: mod_base = OTHER; note = 2'- fluoro
  modified_base 13: mod_base = OTHER; note = 2'-O- methyl
  modified_base 14: mod_base = OTHER; note = 2'- fluoro
  modified_base 15: mod_base = OTHER; note = 2'-O- methyl
  modified_base 16: mod_base = OTHER; note = 2'- fluoro
  modified_base 17: mod_base = OTHER; note = 2'-O- methyl
  modified_base 18: mod_base = OTHER; note = 2'- fluoro
  modified_base 19: mod_base = OTHER; note = 2'-O- methyl
  modified_base 20: mod_base = OTHER; note = 2'- fluoro, 3'- thiophosphate
  modified_base 21: mod_base = OTHER; note = 2'-O- methyl, 3'- thiophosphate
  modified_base 22: mod_base = OTHER; note = 2'- fluoro
tatactttaattttaaaaccca

SEQ ID NO: 374 - RNA, 23 nt, synthetic construct
  source 1..23: mol_type = other RNA
  modified_base 1: mod_base = OTHER; note = 2'-O- methyl, 3'- thiophosphate
  modified_base 2: mod_base = OTHER; note = 2'- fluoro, 3'- thiophosphate
  modified_base 3: mod_base = OTHER; note = 2'-O- methyl
  modified_base 4: mod_base = OTHER; note = 2'- fluoro
  modified_base 5: mod_base = OTHER; note = 2'-O- methyl
  modified_base 6: mod_base = OTHER; note = 2'- fluoro
  modified_base 7: mod_base = OTHER; note = 2'-O- methyl
  modified_base 8: mod_base = OTHER; note = 2'- fluoro
  modified_base 9: mod_base = OTHER; note = 2'-O- methyl
  modified_base 10: mod_base = OTHER; note = 2'- fluoro
  modified_base 11: mod_base = OTHER; note = 2'-O- methyl
  modified_base 12: mod_base = OTHER; note = 2'- fluoro
  modified_base 13: mod_base = OTHER; note = 2'-O- methyl
  modified_base 14: mod_base = OTHER; note = 2'- fluoro
  modified_base 15: mod_base = OTHER; note = 2'-O- methyl
  modified_base 16: mod_base = OTHER; note = 2'- fluoro
  modified_base 17: mod_base = OTHER; note = 2'-O- methyl
  modified_base 18: mod_base = OTHER; note = 2'- fluoro
  modified_base 19: mod_base = OTHER; note = 2'-O- methyl
  modified_base 20: mod_base = OTHER; note = 2'- fluoro
  modified_base 21: mod_base = OTHER; note = 2'-O- methyl, 3'- thiophosphate
  modified_base 22: mod_base = OTHER; note = 2'- fluoro, 3'- thiophosphate
  modified_base 23: mod_base = OTHER; note = 2'-O- methyl
aagggagaaataaccagctatgg

SEQ ID NO: 375 - RNA, 23 nt, synthetic construct
  source 1..23: mol_type = other RNA
  modified_base 1: mod_base = OTHER; note = 2'-O- methyl, 3'- thiophosphate
  modified_base 2: mod_base = OTHER; note = 2'- fluoro, 3'- thiophosphate
  modified_base 3: mod_base = OTHER; note = 2'-O- methyl
  modified_base 4: mod_base = OTHER; note = 2'- fluoro
  modified_base 5: mod_base = OTHER; note = 2'-O- methyl
  modified_base 6: mod_base = OTHER; note = 2'- fluoro
  modified_base 7: mod_base = OTHER; note = 2'-O- methyl
  modified_base 8: mod_base = OTHER; note = 2'- fluoro
  modified_base 9: mod_base = OTHER; note = 2'-O- methyl
  modified_base 10: mod_base = OTHER; note = 2'- fluoro
  modified_base 11: mod_base = OTHER; note = 2'-O- methyl
  modified_base 12: mod_base = OTHER; note = 2'- fluoro
  modified_base 13: mod_base = OTHER; note = 2'-O- methyl
  modified_base 14: mod_base = OTHER; note = 2'- fluoro
  modified_base 15: mod_base = OTHER; note = 2'-O- methyl
  modified_base 16: mod_base = OTHER; note = 2'- fluoro
  modified_base 17: mod_base = OTHER; note = 2'-O- methyl
  modified_base 18: mod_base = OTHER; note = 2'- fluoro
  modified_base 19: mod_base = OTHER; note = 2'-O- methyl
  modified_base 20: mod_base = OTHER; note = 2'- fluoro
  modified_base 21: mod_base = OTHER; note = 2'-O- methyl, 3'- thiophosphate
  modified_base 22: mod_base = OTHER; note = 2'- fluoro, 3'- thiophosphate
  modified_base 23: mod_base = OTHER; note = 2'-O- methyl
acaagggagaaataaccagctat

SEQ ID NO: 376 - RNA, 23 nt, synthetic construct
  source 1..23: mol_type = other RNA
  modified_base 1: mod_base = OTHER; note = 2'-O- methyl, 3'- thiophosphate
  modified_base 2: mod_base = OTHER; note = 2'- fluoro, 3'- thiophosphate
  modified_base 3: mod_base = OTHER; note = 2'-O- methyl
  modified_base 4: mod_base = OTHER; note = 2'- fluoro
  modified_base 5: mod_base = OTHER; note = 2'-O- methyl
  modified_base 6: mod_base = OTHER; note = 2'- fluoro
  modified_base 7: mod_base = OTHER; note = 2'-O- methyl
  modified_base 8: mod_base = OTHER; note = 2'- fluoro
  modified_base 9: mod_base = OTHER; note = 2'-O- methyl
  modified_base 10: mod_base = OTHER; note = 2'- fluoro
  modified_base 11: mod_base = OTHER; note = 2'-O- methyl
  modified_base 12: mod_base = OTHER; note = 2'- fluoro
  modified_base 13: mod_base = OTHER; note = 2'-O- methyl
  modified_base 14: mod_base = OTHER; note = 2'- fluoro
  modified_base 15: mod_base = OTHER; note = 2'-O- methyl
  modified_base 16: mod_base = OTHER; note = 2'- fluoro
  modified_base 17: mod_base = OTHER; note = 2'-O- methyl
  modified_base 18: mod_base = OTHER; note = 2'- fluoro
  modified_base 19: mod_base = OTHER; note = 2'-O- methyl
  modified_base 20: mod_base = OTHER; note = 2'- fluoro
  modified_base 21: mod_base = OTHER; note = 2'-O- methyl, 3'- thiophosphate
  modified_base 22: mod_base = OTHER; note = 2'- fluoro, 3'- thiophosphate
  modified_base 23: mod_base = OTHER; note = 2'-O- methyl
ttaacacaagggagaaataacca

SEQ ID NO: 377 - RNA, 23 nt, synthetic construct
  source 1..23: mol_type = other RNA
  modified_base 1: mod_base = OTHER; note = 2'-O- methyl, 3'- thiophosphate
  modified_base 2: mod_base = OTHER; note = 2'- fluoro, 3'- thiophosphate
  modified_base 3: mod_base = OTHER; note = 2'-O- methyl
  modified_base 4: mod_base = OTHER; note = 2'- fluoro
  modified_base 5: mod_base = OTHER; note = 2'-O- methyl
  modified_base 6: mod_base = OTHER; note = 2'- fluoro
  modified_base 7: mod_base = OTHER; note = 2'-O- methyl
  modified_base 8: mod_base = OTHER; note = 2'- fluoro
  modified_base 9: mod_base = OTHER; note = 2'-O- methyl
  modified_base 10: mod_base = OTHER; note = 2'- fluoro
  modified_base 11: mod_base = OTHER; note = 2'-O- methyl
  modified_base 12: mod_base = OTHER; note = 2'- fluoro
  modified_base 13: mod_base = OTHER; note = 2'-O- methyl
  modified_base 14: mod_base = OTHER; note = 2'- fluoro
  modified_base 15: mod_base = OTHER; note = 2'-O- methyl
  modified_base 16: mod_base = OTHER; note = 2'- fluoro
  modified_base 17: mod_base = OTHER; note = 2'-O- methyl
  modified_base 18: mod_base = OTHER; note = 2'- fluoro
  modified_base 19: mod_base = OTHER; note = 2'-O- methyl
  modified_base 20: mod_base = OTHER; note = 2'- fluoro
  modified_base 21: mod_base = OTHER; note = 2'-O- methyl, 3'- thiophosphate
  modified_base 22: mod_base = OTHER; note = 2'- fluoro, 3'- thiophosphate
  modified_base 23: mod_base = OTHER; note = 2'-O- methyl
tattactaacacaagggagaaat

SEQ ID NO: 378 - RNA, 23 nt, synthetic construct
  source 1..23: mol_type = other RNA
  modified_base 1: mod_base = OTHER; note = 2'-O- methyl, 3'- thiophosphate
  modified_base 2: mod_base = OTHER; note = 2'- fluoro, 3'- thiophosphate
  modified_base 3: mod_base = OTHER; note = 2'-O- methyl
  modified_base 4: mod_base = OTHER; note = 2'- fluoro
  modified_base 5: mod_base = OTHER; note = 2'-O- methyl
  modified_base 6: mod_base = OTHER; note = 2'- fluoro
  modified_base 7: mod_base = OTHER; note = 2'-O- methyl
  modified_base 8: mod_base = OTHER; note = 2'- fluoro
  modified_base 9: mod_base = OTHER; note = 2'-O- methyl
  modified_base 10: mod_base = OTHER; note = 2'- fluoro
  modified_base 11: mod_base = OTHER; note = 2'-O- methyl
  modified_base 12: mod_base = OTHER; note = 2'- fluoro
  modified_base 13: mod_base = OTHER; note = 2'-O- methyl
  modified_base 14: mod_base = OTHER; note = 2'- fluoro
  modified_base 15: mod_base = OTHER; note = 2'-O- methyl
  modified_base 16: mod_base = OTHER; note = 2'- fluoro
  modified_base 17: mod_base = OTHER; note = 2'-O- methyl
  modified_base 18: mod_base = OTHER; note = 2'- fluoro
  modified_base 19: mod_base = OTHER; note = 2'-O- methyl
  modified_base 20: mod_base = OTHER; note = 2'- fluoro
  modified_base 21: mod_base = OTHER; note = 2'-O- methyl, 3'- thiophosphate
  modified_base 22: mod_base = OTHER; note = 2'- fluoro, 3'- thiophosphate
  modified_base 23: mod_base = OTHER; note = 2'-O- methyl
ttattactaacacaagggagaaa

SEQ ID NO: 379 - RNA, 23 nt, synthetic construct
  source 1..23: mol_type = other RNA
  modified_base 1: mod_base = OTHER; note = 2'-O- methyl, 3'- thiophosphate
  modified_base 2: mod_base = OTHER; note = 2'- fluoro, 3'- thiophosphate
  modified_base 3: mod_base = OTHER; note = 2'-O- methyl
  modified_base 4: mod_base = OTHER; note = 2'- fluoro
  modified_base 5: mod_base = OTHER; note = 2'-O- methyl
  modified_base 6: mod_base = OTHER; note = 2'- fluoro
  modified_base 7: mod_base = OTHER; note = 2'-O- methyl
  modified_base 8: mod_base = OTHER; note = 2'- fluoro
  modified_base 9: mod_base = OTHER; note = 2'-O- methyl
  modified_base 10: mod_base = OTHER; note = 2'- fluoro
  modified_base 11: mod_base = OTHER; note = 2'-O- methyl
  modified_base 12: mod_base = OTHER; note = 2'- fluoro
  modified_base 13: mod_base = OTHER; note = 2'-O- methyl
  modified_base 14: mod_base = OTHER; note = 2'- fluoro
  modified_base 15: mod_base = OTHER; note = 2'-O- methyl
  modified_base 16: mod_base = OTHER; note = 2'- fluoro
  modified_base 17: mod_base = OTHER; note = 2'-O- methyl
  modified_base 18: mod_base = OTHER; note = 2'- fluoro
  modified_base 19: mod_base = OTHER; note = 2'-O- methyl
  modified_base 20: mod_base = OTHER; note = 2'- fluoro
  modified_base 21: mod_base = OTHER; note = 2'-O- methyl, 3'- thiophosphate
  modified_base 22: mod_base = OTHER; note = 2'- fluoro, 3'- thiophosphate
  modified_base 23: mod_base = OTHER; note = 2'-O- methyl
tttattactaacacaagggagaa

SEQ ID NO: 380 - RNA, 23 nt, synthetic construct
  source 1..23: mol_type = other RNA
  modified_base 1: mod_base = OTHER; note = 2'-O- methyl, 3'- thiophosphate
  modified_base 2: mod_base = OTHER; note = 2'- fluoro, 3'- thiophosphate
  modified_base 3: mod_base = OTHER; note = 2'-O- methyl
  modified_base 4: mod_base = OTHER; note = 2'- fluoro
  modified_base 5: mod_base = OTHER; note = 2'-O- methyl
  modified_base 6: mod_base = OTHER; note = 2'- fluoro
  modified_base 7: mod_base = OTHER; note = 2'-O- methyl
  modified_base 8: mod_base = OTHER; note = 2'- fluoro
  modified_base 9: mod_base = OTHER; note = 2'-O- methyl
  modified_base 10: mod_base = OTHER; note = 2'- fluoro
  modified_base 11: mod_base = OTHER; note = 2'-O- methyl
  modified_base 12: mod_base = OTHER; note = 2'- fluoro
  modified_base 13: mod_base = OTHER; note = 2'-O- methyl
  modified_base 14: mod_base = OTHER; note = 2'- fluoro
  modified_base 15: mod_base = OTHER; note = 2'-O- methyl
  modified_base 16: mod_base = OTHER; note = 2'- fluoro
  modified_base 17: mod_base = OTHER; note = 2'-O- methyl
  modified_base 18: mod_base = OTHER; note = 2'- fluoro
  modified_base 19: mod_base = OTHER; note = 2'-O- methyl
  modified_base 20: mod_base = OTHER; note = 2'- fluoro
  modified_base 21: mod_base = OTHER; note = 2'-O- methyl, 3'- thiophosphate
  modified_base 22: mod_base = OTHER; note = 2'- fluoro, 3'- thiophosphate
  modified_base 23: mod_base = OTHER; note = 2'-O- methyl
ttttattactaacacaagggaga

SEQ ID NO: 381 - RNA, 23 nt, synthetic construct
  source 1..23: mol_type = other RNA
  modified_base 1: mod_base = OTHER; note = 2'-O- methyl, 3'- thiophosphate
  modified_base 2: mod_base = OTHER; note = 2'- fluoro, 3'- thiophosphate
  modified_base 3: mod_base = OTHER; note = 2'-O- methyl
  modified_base 4: mod_base = OTHER; note = 2'- fluoro
  modified_base 5: mod_base = OTHER; note = 2'-O- methyl
  modified_base 6: mod_base = OTHER; note = 2'- fluoro
  modified_base 7: mod_base = OTHER; note = 2'-O- methyl
  modified_base 8: mod_base = OTHER; note = 2'- fluoro
  modified_base 9: mod_base = OTHER; note = 2'-O- methyl
  modified_base 10: mod_base = OTHER; note = 2'- fluoro
  modified_base 11: mod_base = OTHER; note = 2'-O- methyl
  modified_base 12: mod_base = OTHER; note = 2'- fluoro
  modified_base 13: mod_base = OTHER; note = 2'-O- methyl
  modified_base 14: mod_base = OTHER; note = 2'- fluoro
  modified_base 15: mod_base = OTHER; note = 2'-O- methyl
  modified_base 16: mod_base = OTHER; note = 2'- fluoro
  modified_base 17: mod_base = OTHER; note = 2'-O- methyl
  modified_base 18: mod_base = OTHER; note = 2'- fluoro
  modified_base 19: mod_base = OTHER; note = 2'-O- methyl
  modified_base 20: mod_base = OTHER; note = 2'- fluoro
  modified_base 21: mod_base = OTHER; note = 2'-O- methyl, 3'- thiophosphate
  modified_base 22: mod_base = OTHER; note = 2'- fluoro, 3'- thiophosphate
  modified_base 23: mod_base = OTHER; note = 2'-O- methyl
tcagcagcaacatccagttctgt

SEQ ID NO: 382 - RNA, 23 nt, synthetic construct
  source 1..23: mol_type = other RNA
  modified_base 1: mod_base = OTHER; note = 2'-O- methyl, 3'- thiophosphate
  modified_base 2: mod_base = OTHER; note = 2'- fluoro, 3'- thiophosphate
  modified_base 3: mod_base = OTHER; note = 2'-O- methyl
  modified_base 4: mod_base = OTHER; note = 2'- fluoro
  modified_base 5: mod_base = OTHER; note = 2'-O- methyl
  modified_base 6: mod_base = OTHER; note = 2'- fluoro
  modified_base 7: mod_base = OTHER; note = 2'-O- methyl
  modified_base 8: mod_base = OTHER; note = 2'- fluoro
  modified_base 9: mod_base = OTHER; note = 2'-O- methyl
  modified_base 10: mod_base = OTHER; note = 2'- fluoro
  modified_base 11: mod_base = OTHER; note = 2'-O- methyl
  modified_base 12: mod_base = OTHER; note = 2'- fluoro
  modified_base 13: mod_base = OTHER; note = 2'-O- methyl
  modified_base 14: mod_base = OTHER; note = 2'- fluoro
  modified_base 15: mod_base = OTHER; note = 2'-O- methyl
  modified_base 16: mod_base = OTHER; note = 2'- fluoro
  modified_base 17: mod_base = OTHER; note = 2'-O- methyl
  modified_base 18: mod_base = OTHER; note = 2'- fluoro
  modified_base 19: mod_base = OTHER; note = 2'-O- methyl
  modified_base 20: mod_base = OTHER; note = 2'- fluoro
  modified_base 21: mod_base = OTHER; note = 2'-O- methyl, 3'- thiophosphate
  modified_base 22: mod_base = OTHER; note = 2'- fluoro, 3'- thiophosphate
  modified_base 23: mod_base = OTHER; note = 2'-O- methyl
tctcagcagcaacatccagttct

SEQ ID NO: 383 - RNA, 23 nt, synthetic construct
  source 1..23: mol_type = other RNA
  modified_base 1: mod_base = OTHER; note = 2'-O- methyl, 3'- thiophosphate
  modified_base 2: mod_base = OTHER; note = 2'- fluoro, 3'- thiophosphate
  modified_base 3: mod_base = OTHER; note = 2'-O- methyl
  modified_base 4: mod_base = OTHER; note = 2'- fluoro
  modified_base 5: mod_base = OTHER; note = 2'-O- methyl
  modified_base 6: mod_base = OTHER; note = 2'- fluoro
  modified_base 7: mod_base = OTHER; note = 2'-O- methyl
  modified_base 8: mod_base = OTHER; note = 2'- fluoro
  modified_base 9: mod_base = OTHER; note = 2'-O- methyl
  modified_base 10: mod_base = OTHER; note = 2'- fluoro
  modified_base 11: mod_base = OTHER; note = 2'-O- methyl
  modified_base 12: mod_base = OTHER; note = 2'- fluoro
  modified_base 13: mod_base = OTHER; note = 2'-O- methyl
  modified_base 14: mod_base = OTHER; note = 2'- fluoro
  modified_base 15: mod_base = OTHER; note = 2'-O- methyl
  modified_base 16: mod_base = OTHER; note = 2'- fluoro
  modified_base 17: mod_base = OTHER; note = 2'-O- methyl
  modified_base 18: mod_base = OTHER; note = 2'- fluoro
  modified_base 19: mod_base = OTHER; note = 2'-O- methyl
  modified_base 20: mod_base = OTHER; note = 2'- fluoro
  modified_base 21: mod_base = OTHER; note = 2'-O- methyl, 3'- thiophosphate
  modified_base 22: mod_base = OTHER; note = 2'- fluoro, 3'- thiophosphate
  modified_base 23: mod_base = OTHER; note = 2'-O- methyl
ttctcagcagcaacatccagttc

SEQ ID NO: 384 - RNA, 23 nt, synthetic construct
  source 1..23: mol_type = other RNA
  modified_base 1: mod_base = OTHER; note = 2'-O- methyl, 3'- thiophosphate
  modified_base 2: mod_base = OTHER; note = 2'- fluoro, 3'- thiophosphate
  modified_base 3: mod_base = OTHER; note = 2'-O- methyl
  modified_base 4: mod_base = OTHER; note = 2'- fluoro
  modified_base 5: mod_base = OTHER; note = 2'-O- methyl
  modified_base 6: mod_base = OTHER; note = 2'- fluoro
  modified_base 7: mod_base = OTHER; note = 2'-O- methyl
  modified_base 8: mod_base = OTHER; note = 2'- fluoro
  modified_base 9: mod_base = OTHER; note = 2'-O- methyl
  modified_base 10: mod_base = OTHER; note = 2'- fluoro
  modified_base 11: mod_base = OTHER; note = 2'-O- methyl
  modified_base 12: mod_base = OTHER; note = 2'- fluoro
  modified_base 13: mod_base = OTHER; note = 2'-O- methyl
  modified_base 14: mod_base = OTHER; note = 2'- fluoro
  modified_base 15: mod_base = OTHER; note = 2'-O- methyl
  modified_base 16: mod_base = OTHER; note = 2'- fluoro
  modified_base 17: mod_base = OTHER; note = 2'-O- methyl
  modified_base 18: mod_base = OTHER; note = 2'- fluoro
  modified_base 19: mod_base = OTHER; note = 2'-O- methyl
  modified_base 20: mod_base = OTHER; note = 2'- fluoro
  modified_base 21: mod_base = OTHER; note = 2'-O- methyl, 3'- thiophosphate
  modified_base 22: mod_base = OTHER; note = 2'- fluoro, 3'- thiophosphate
  modified_base 23: mod_base = OTHER; note = 2'-O- methyl
tcttctcagcagcaacatccagt

SEQ ID NO: 385 - RNA, 22 nt, synthetic construct
  source 1..22: mol_type = other RNA
  modified_base 1: mod_base = OTHER; note = 2'-O- methyl, 3'- thiophosphate
  modified_base 2: mod_base = OTHER; note = 2'- fluoro, 3'- thiophosphate
  modified_base 3: mod_base = OTHER; note = 2'-O- methyl
  modified_base 4: mod_base = OTHER; note = 2'- fluoro
  modified_base 5: mod_base = OTHER; note = 2'-O- methyl
  modified_base 6: mod_base = OTHER; note = 2'- fluoro
  modified_base 7: mod_base = OTHER; note = 2'-O- methyl
  modified_base 8: mod_base = OTHER; note = 2'- fluoro
  modified_base 9: mod_base = OTHER; note = 2'-O- methyl
  modified_base 10: mod_base = OTHER; note = 2'- fluoro
  modified_base 11: mod_base = OTHER; note = 2'-O- methyl
  modified_base 12: mod_base = OTHER; note = 2'- fluoro
  modified_base 13: mod_base = OTHER; note = 2'-O- methyl
  modified_base 14: mod_base = OTHER; note = 2'- fluoro
  modified_base 15: mod_base = OTHER; note = 2'-O- methyl
  modified_base 16: mod_base = OTHER; note = 2'- fluoro
  modified_base 17: mod_base = OTHER; note = 2'-O- methyl
  modified_base 18: mod_base = OTHER; note = 2'- fluoro
  modified_base 19: mod_base = OTHER; note = 2'-O- methyl
  modified_base 20: mod_base = OTHER; note = 2'- fluoro, 3'- thiophosphate
  modified_base 21: mod_base = OTHER; note = 2'-O- methyl, 3'- thiophosphate
  modified_base 22: mod_base = OTHER; note = 2'- fluoro
tttctcagcagcaacatccagt

SEQ ID NO: 386 - RNA, 23 nt, synthetic construct
  source 1..23: mol_type = other RNA
  modified_base 1: mod_base = OTHER; note = 2'-O- methyl, 3'- thiophosphate
  modified_base 2: mod_base = OTHER; note = 2'- fluoro, 3'- thiophosphate
  modified_base 3: mod_base = OTHER; note = 2'-O- methyl
  modified_base 4: mod_base = OTHER; note = 2'- fluoro
  modified_base 5: mod_base = OTHER; note = 2'-O- methyl
  modified_base 6: mod_base = OTHER; note = 2'- fluoro
  modified_base 7: mod_base = OTHER; note = 2'-O- methyl
  modified_base 8: mod_base = OTHER; note = 2'- fluoro
  modified_base 9: mod_base = OTHER; note = 2'-O- methyl
  modified_base 10: mod_base = OTHER; note = 2'- fluoro
  modified_base 11: mod_base = OTHER; note = 2'-O- methyl
  modified_base 12: mod_base = OTHER; note = 2'- fluoro
  modified_base 13: mod_base = OTHER; note = 2'-O- methyl
  modified_base 14: mod_base = OTHER; note = 2'- fluoro
  modified_base 15: mod_base = OTHER; note = 2'-O- methyl
  modified_base 16: mod_base = OTHER; note = 2'- fluoro
  modified_base 17: mod_base = OTHER; note = 2'-O- methyl
  modified_base 18: mod_base = OTHER; note = 2'- fluoro
  modified_base 19: mod_base = OTHER; note = 2'-O- methyl
  modified_base 20: mod_base = OTHER; note = 2'- fluoro
  modified_base 21: mod_base = OTHER; note = 2'-O- methyl, 3'- thiophosphate
  modified_base 22: mod_base = OTHER; note = 2'- fluoro, 3'- thiophosphate
  modified_base 23: mod_base = OTHER; note = 2'-O- methyl
aatcttctcagcagcaacatcca

SEQ ID NO: 387 - RNA, 23 nt, synthetic construct
  source 1..23: mol_type = other RNA
  modified_base 1: mod_base = OTHER; note = 2'-O- methyl, 3'- thiophosphate
  modified_base 2: mod_base = OTHER; note = 2'- fluoro, 3'- thiophosphate
  modified_base 3: mod_base = OTHER; note = 2'-O- methyl
  modified_base 4: mod_base = OTHER; note = 2'- fluoro
  modified_base 5: mod_base = OTHER; note = 2'-O- methyl
  modified_base 6: mod_base = OTHER; note = 2'- fluoro
  modified_base 7: mod_base = OTHER; note = 2'-O- methyl
  modified_base 8: mod_base = OTHER; note = 2'- fluoro
  modified_base 9: mod_base = OTHER; note = 2'-O- methyl
  modified_base 10: mod_base = OTHER; note = 2'- fluoro
  modified_base 11: mod_base = OTHER; note = 2'-O- methyl
  modified_base 12: mod_base = OTHER; note = 2'- fluoro
  modified_base 13: mod_base = OTHER; note = 2'-O- methyl
  modified_base 14: mod_base = OTHER; note = 2'- fluoro
  modified_base 15: mod_base = OTHER; note = 2'-O- methyl
  modified_base 16: mod_base = OTHER; note = 2'- fluoro
  modified_base 17: mod_base = OTHER; note = 2'-O- methyl
  modified_base 18: mod_base = OTHER; note = 2'- fluoro
  modified_base 19: mod_base = OTHER; note = 2'-O- methyl
  modified_base 20: mod_base = OTHER; note = 2'- fluoro
  modified_base 21: mod_base = OTHER; note = 2'-O- methyl, 3'- thiophosphate
  modified_base 22: mod_base = OTHER; note = 2'- fluoro, 3'- thiophosphate
  modified_base 23: mod_base = OTHER; note = 2'-O- methyl
acctgtcaatcttctcagcagca

SEQ ID NO: 388 - RNA, 22 nt, synthetic construct
  source 1..22: mol_type = other RNA
  modified_base 1: mod_base = OTHER; note = 2'-O- methyl, 3'- thiophosphate
  modified_base 2: mod_base = OTHER; note = 2'- fluoro, 3'- thiophosphate
  modified_base 3: mod_base = OTHER; note = 2'-O- methyl
  modified_base 4: mod_base = OTHER; note = 2'- fluoro
  modified_base 5: mod_base = OTHER; note = 2'-O- methyl
  modified_base 6: mod_base = OTHER; note = 2'- fluoro
  modified_base 7: mod_base = OTHER; note = 2'-O- methyl
  modified_base 8: mod_base = OTHER; note = 2'- fluoro
  modified_base 9: mod_base = OTHER; note = 2'-O- methyl
  modified_base 10: mod_base = OTHER; note = 2'- fluoro
  modified_base 11: mod_base = OTHER; note = 2'-O- methyl
  modified_base 12: mod_base = OTHER; note = 2'- fluoro
  modified_base 13: mod_base = OTHER; note = 2'-O- methyl
  modified_base 14: mod_base = OTHER; note = 2'- fluoro
  modified_base 15: mod_base = OTHER; note = 2'-O- methyl
  modified_base 16: mod_base = OTHER; note = 2'- fluoro
  modified_base 17: mod_base = OTHER; note = 2'-O- methyl
  modified_base 18: mod_base = OTHER; note = 2'- fluoro
  modified_base 19: mod_base = OTHER; note = 2'-O- methyl
  modified_base 20: mod_base = OTHER; note = 2'- fluoro, 3'- thiophosphate
  modified_base 21: mod_base = OTHER; note = 2'-O- methyl, 3'- thiophosphate
  modified_base 22: mod_base = OTHER; note = 2'- fluoro
tctgcatgaacctgtcaatctt

SEQ ID NO: 389 - RNA, 23 nt, synthetic construct
  source 1..23: mol_type = other RNA
  modified_base 1: mod_base = OTHER; note = 2'-O- methyl, 3'- thiophosphate
  modified_base 2: mod_base = OTHER; note = 2'- fluoro, 3'- thiophosphate
  modified_base 3: mod_base = OTHER; note = 2'-O- methyl
  modified_base 4: mod_base = OTHER; note = 2'- fluoro
  modified_base 5: mod_base = OTHER; note = 2'-O- methyl
  modified_base 6: mod_base = OTHER; note = 2'- fluoro
  modified_base 7: mod_base = OTHER; note = 2'-O- methyl
  modified_base 8: mod_base = OTHER; note = 2'- fluoro
  modified_base 9: mod_base = OTHER; note = 2'-O- methyl
  modified_base 10: mod_base = OTHER; note = 2'- fluoro
  modified_base 11: mod_base = OTHER; note = 2'-O- methyl
  modified_base 12: mod_base = OTHER; note = 2'- fluoro
  modified_base 13: mod_base = OTHER; note = 2'-O- methyl
  modified_base 14: mod_base = OTHER; note = 2'- fluoro
  modified_base 15: mod_base = OTHER; note = 2'-O- methyl
  modified_base 16: mod_base = OTHER; note = 2'- fluoro
  modified_base 17: mod_base = OTHER; note = 2'-O- methyl
  modified_base 18: mod_base = OTHER; note = 2'- fluoro
  modified_base 19: mod_base = OTHER; note = 2'-O- methyl
  modified_base 20: mod_base = OTHER; note = 2'- fluoro
  modified_base 21: mod_base = OTHER; note = 2'-O- methyl, 3'- thiophosphate
  modified_base 22: mod_base = OTHER; note = 2'- fluoro, 3'- thiophosphate
  modified_base 23: mod_base = OTHER; note = 2'-O- methyl
tcctggatgtcactccagtgctg

SEQ ID NO: 390 - RNA, 23 nt, synthetic construct
  source 1..23: mol_type = other RNA
  modified_base 1: mod_base = OTHER; note = 2'-O- methyl, 3'- thiophosphate
  modified_base 2: mod_base = OTHER; note = 2'- fluoro, 3'- thiophosphate
  modified_base 3: mod_base = OTHER; note = 2'-O- methyl
  modified_base 4: mod_base = OTHER; note = 2'- fluoro
  modified_base 5: mod_base = OTHER; note = 2'-O- methyl
  modified_base 6: mod_base = OTHER; note = 2'- fluoro
  modified_base 7: mod_base = OTHER; note = 2'-O- methyl
  modified_base 8: mod_base = OTHER; note = 2'- fluoro
  modified_base 9: mod_base = OTHER; note = 2'-O- methyl
  modified_base 10: mod_base = OTHER; note = 2'- fluoro
  modified_base 11: mod_base = OTHER; note = 2'-O- methyl
  modified_base 12: mod_base = OTHER; note = 2'- fluoro
  modified_base 13: mod_base = OTHER; note = 2'-O- methyl
  modified_base 14: mod_base = OTHER; note = 2'- fluoro
  modified_base 15: mod_base = OTHER; note = 2'-O- methyl
  modified_base 16: mod_base = OTHER; note = 2'- fluoro
  modified_base 17: mod_base = OTHER; note = 2'-O- methyl
  modified_base 18: mod_base = OTHER; note = 2'- fluoro
  modified_base 19: mod_base = OTHER; note = 2'-O- methyl
  modified_base 20: mod_base = OTHER; note = 2'- fluoro
  modified_base 21: mod_base = OTHER; note = 2'-O- methyl, 3'- thiophosphate
  modified_base 22: mod_base = OTHER; note = 2'- fluoro, 3'- thiophosphate
  modified_base 23: mod_base = OTHER; note = 2'-O- methyl
ttgtcctggatgtcactccagtg

SEQ ID NO: 391 - RNA, 23 nt, synthetic construct
  source 1..23: mol_type = other RNA
  modified_base 1: mod_base = OTHER; note = 2'-O- methyl, 3'- thiophosphate
  modified_base 2: mod_base = OTHER; note = 2'- fluoro, 3'- thiophosphate
  modified_base 3: mod_base = OTHER; note = 2'-O- methyl
  modified_base 4: mod_base = OTHER; note = 2'- fluoro
  modified_base 5: mod_base = OTHER; note = 2'-O- methyl
  modified_base 6: mod_base = OTHER; note = 2'- fluoro
  modified_base 7: mod_base = OTHER; note = 2'-O- methyl
  modified_base 8: mod_base = OTHER; note = 2'- fluoro
  modified_base 9: mod_base = OTHER; note = 2'-O- methyl
  modified_base 10: mod_base = OTHER; note = 2'- fluoro
  modified_base 11: mod_base = OTHER; note = 2'-O- methyl
  modified_base 12: mod_base = OTHER; note = 2'- fluoro
  modified_base 13: mod_base = OTHER; note = 2'-O- methyl
  modified_base 14: mod_base = OTHER; note = 2'- fluoro
  modified_base 15: mod_base = OTHER; note = 2'-O- methyl
  modified_base 16: mod_base = OTHER; note = 2'- fluoro
  modified_base 17: mod_base = OTHER; note = 2'-O- methyl
  modified_base 18: mod_base = OTHER; note = 2'- fluoro
  modified_base 19: mod_base = OTHER; note = 2'-O- methyl
  modified_base 20: mod_base = OTHER; note = 2'- fluoro
  modified_base 21: mod_base = OTHER; note = 2'-O- methyl, 3'- thiophosphate
  modified_base 22: mod_base = OTHER; note = 2'- fluoro, 3'- thiophosphate
  modified_base 23: mod_base = OTHER; note = 2'-O- methyl
aagttgtcctggatgtcactcca

SEQ ID NO: 392 - RNA, 23 nt, synthetic construct
  source 1..23: mol_type = other RNA
  modified_base 1: mod_base = OTHER; note = 2'-O- methyl, 3'- thiophosphate
  modified_base 2: mod_base = OTHER; note = 2'- fluoro, 3'- thiophosphate
  modified_base 3: mod_base = OTHER; note = 2'-O- methyl
  modified_base 4: mod_base = OTHER; note = 2'- fluoro
  modified_base 5: mod_base = OTHER; note = 2'-O- methyl
  modified_base 6: mod_base = OTHER; note = 2'- fluoro
  modified_base 7: mod_base = OTHER; note = 2'-O- methyl
  modified_base 8: mod_base = OTHER; note = 2'- fluoro
  modified_base 9: mod_base = OTHER; note = 2'-O- methyl
  modified_base 10: mod_base = OTHER; note = 2'- fluoro
  modified_base 11: mod_base = OTHER; note = 2'-O- methyl
  modified_base 12: mod_base = OTHER; note = 2'- fluoro
  modified_base 13: mod_base = OTHER; note = 2'-O- methyl
  modified_base 14: mod_base = OTHER; note = 2'- fluoro
  modified_base 15: mod_base = OTHER; note = 2'-O- methyl
  modified_base 16: mod_base = OTHER; note = 2'- fluoro
  modified_base 17: mod_base = OTHER; note = 2'-O- methyl
  modified_base 18: mod_base = OTHER; note = 2'- fluoro
  modified_base 19: mod_base = OTHER; note = 2'-O- methyl
  modified_base 20: mod_base = OTHER; note = 2'- fluoro
  modified_base 21: mod_base = OTHER; note = 2'-O- methyl, 3'- thiophosphate
  modified_base 22: mod_base = OTHER; note = 2'- fluoro, 3'- thiophosphate
  modified_base 23: mod_base = OTHER; note = 2'-O- methyl
agaagttgtcctggatgtcactc

SEQ ID NO: 393 - RNA, 23 nt, synthetic construct
  source 1..23: mol_type = other RNA
  modified_base 1: mod_base = OTHER; note = 2'-O- methyl, 3'- thiophosphate
  modified_base 2: mod_base = OTHER; note = 2'- fluoro, 3'- thiophosphate
  modified_base 3: mod_base = OTHER; note = 2'-O- methyl
  modified_base 4: mod_base = OTHER; note = 2'- fluoro
  modified_base 5: mod_base = OTHER; note = 2'-O- methyl
  modified_base 6: mod_base = OTHER; note = 2'- fluoro
  modified_base 7: mod_base = OTHER; note = 2'-O- methyl
  modified_base 8: mod_base = OTHER; note = 2'- fluoro
  modified_base 9: mod_base = OTHER; note = 2'-O- methyl
  modified_base 10: mod_base = OTHER; note = 2'- fluoro
  modified_base 11: mod_base = OTHER; note = 2'-O- methyl
  modified_base 12: mod_base = OTHER; note = 2'- fluoro
  modified_base 13: mod_base = OTHER; note = 2'-O- methyl
  modified_base 14: mod_base = OTHER; note = 2'- fluoro
  modified_base 15: mod_base = OTHER; note = 2'-O- methyl
  modified_base 16: mod_base = OTHER; note = 2'- fluoro
  modified_base 17: mod_base = OTHER; note = 2'-O- methyl
  modified_base 18: mod_base = OTHER; note = 2'- fluoro
  modified_base 19: mod_base = OTHER; note = 2'-O- methyl
  modified_base 20: mod_base = OTHER; note = 2'- fluoro
  modified_base 21: mod_base = OTHER; note = 2'-O- methyl, 3'- thiophosphate
  modified_base 22: mod_base = OTHER; note = 2'- fluoro, 3'- thiophosphate
  modified_base 23: mod_base = OTHER; note = 2'-O- methyl
ttgagtcaccgagaagttgtcct

SEQ ID NO: 394 - RNA, 23 nt, synthetic construct
  source 1..23: mol_type = other RNA
  modified_base 1: mod_base = OTHER; note = 2'-O- methyl, 3'- thiophosphate
  modified_base 2: mod_base = OTHER; note = 2'- fluoro, 3'- thiophosphate
  modified_base 3: mod_base = OTHER; note = 2'-O- methyl
  modified_base 4: mod_base = OTHER; note = 2'- fluoro
  modified_base 5: mod_base = OTHER; note = 2'-O- methyl
  modified_base 6: mod_base = OTHER; note = 2'- fluoro
  modified_base 7: mod_base = OTHER; note = 2'-O- methyl
  modified_base 8: mod_base = OTHER; note = 2'- fluoro
  modified_base 9: mod_base = OTHER; note = 2'-O- methyl
  modified_base 10: mod_base = OTHER; note = 2'- fluoro
  modified_base 11: mod_base = OTHER; note = 2'-O- methyl
  modified_base 12: mod_base = OTHER; note = 2'- fluoro
  modified_base 13: mod_base = OTHER; note = 2'-O- methyl
  modified_base 14: mod_base = OTHER; note = 2'- fluoro
  modified_base 15: mod_base = OTHER; note = 2'-O- methyl
  modified_base 16: mod_base = OTHER; note = 2'- fluoro
  modified_base 17: mod_base = OTHER; note = 2'-O- methyl
  modified_base 18: mod_base = OTHER; note = 2'- fluoro
  modified_base 19: mod_base = OTHER; note = 2'-O- methyl
  modified_base 20: mod_base = OTHER; note = 2'- fluoro
  modified_base 21: mod_base = OTHER; note = 2'-O- methyl, 3'- thiophosphate
  modified_base 22: mod_base = OTHER; note = 2'- fluoro, 3'- thiophosphate
  modified_base 23: mod_base = OTHER; note = 2'-O- methyl
acttgagtcaccgagaagttgtc

SEQ ID NO: 395 - RNA, 23 nt, synthetic construct
  source 1..23: mol_type = other RNA
  modified_base 1: mod_base = OTHER; note = 2'-O- methyl, 3'- thiophosphate
  modified_base 2: mod_base = OTHER; note = 2'- fluoro, 3'- thiophosphate
  modified_base 3: mod_base = OTHER; note = 2'-O- methyl
  modified_base 4: mod_base = OTHER; note = 2'- fluoro
  modified_base 5: mod_base = OTHER; note = 2'-O- methyl
  modified_base 6: mod_base = OTHER; note = 2'- fluoro
  modified_base 7: mod_base = OTHER; note = 2'-O- methyl
  modified_base 8: mod_base = OTHER; note = 2'- fluoro
  modified_base 9: mod_base = OTHER; note = 2'-O- methyl
  modified_base 10: mod_base = OTHER; note = 2'- fluoro
  modified_base 11: mod_base = OTHER; note = 2'-O- methyl
  modified_base 12: mod_base = OTHER; note = 2'- fluoro
  modified_base 13: mod_base = OTHER; note = 2'-O- methyl
  modified_base 14: mod_base = OTHER; note = 2'- fluoro
  modified_base 15: mod_base = OTHER; note = 2'-O- methyl
  modified_base 16: mod_base = OTHER; note = 2'- fluoro
  modified_base 17: mod_base = OTHER; note = 2'-O- methyl
  modified_base 18: mod_base = OTHER; note = 2'- fluoro
  modified_base 19: mod_base = OTHER; note = 2'-O- methyl
  modified_base 20: mod_base = OTHER; note = 2'- fluoro
  modified_base 21: mod_base = OTHER; note = 2'-O- methyl, 3'- thiophosphate
  modified_base 22: mod_base = OTHER; note = 2'- fluoro, 3'- thiophosphate
  modified_base 23: mod_base = OTHER; note = 2'-O- methyl
tgaagggcacttgagtcaccgag

SEQ ID NO: 396 - RNA, 23 nt, synthetic construct
  source 1..23: mol_type = other RNA
  modified_base 1: mod_base = OTHER; note = 2'-O- methyl, 3'- thiophosphate
  modified_base 2: mod_base = OTHER; note = 2'- fluoro, 3'- thiophosphate
  modified_base 3: mod_base = OTHER; note = 2'-O- methyl
  modified_base 4: mod_base = OTHER; note = 2'- fluoro
  modified_base 5: mod_base = OTHER; note = 2'-O- methyl
  modified_base 6: mod_base = OTHER; note = 2'- fluoro
  modified_base 7: mod_base = OTHER; note = 2'-O- methyl
  modified_base 8: mod_base = OTHER; note = 2'- fluoro
  modified_base 9: mod_base = OTHER; note = 2'-O- methyl
  modified_base 10: mod_base = OTHER; note = 2'- fluoro
  modified_base 11: mod_base = OTHER; note = 2'-O- methyl
  modified_base 12: mod_base = OTHER; note = 2'- fluoro
  modified_base 13: mod_base = OTHER; note = 2'-O- methyl
  modified_base 14: mod_base = OTHER; note = 2'- fluoro
  modified_base 15: mod_base = OTHER; note = 2'-O- methyl
  modified_base 16: mod_base = OTHER; note = 2'- fluoro
  modified_base 17: mod_base = OTHER; note = 2'-O- methyl
  modified_base 18: mod_base = OTHER; note = 2'- fluoro
  modified_base 19: mod_base = OTHER; note = 2'-O- methyl
  modified_base 20: mod_base = OTHER; note = 2'- fluoro
  modified_base 21: mod_base = OTHER; note = 2'-O- methyl, 3'- thiophosphate
  modified_base 22: mod_base = OTHER; note = 2'- fluoro, 3'- thiophosphate
  modified_base 23: mod_base = OTHER; note = 2'-O- methyl
agtgaagggcacttgagtcaccg

SEQ ID NO: 397 - RNA, 21 nt, synthetic construct
  source 1..21: mol_type = other RNA
  modified_base 1: mod_base = OTHER; note = 2'-O- methyl, 3'- thiophosphate
  modified_base 2: mod_base = OTHER; note = 2'-O- methyl, 3'- thiophosphate
  modified_base 3: mod_base = OTHER; note = 2'-O- methyl
  modified_base 4: mod_base = OTHER; note = 2'-O- methyl
  modified_base 5: mod_base = OTHER; note = 2'-O- methyl
  modified_base 6: mod_base = OTHER; note = 2'-O- methyl
  modified_base 7: mod_base = OTHER; note = 2'- fluoro
  modified_base 8: mod_base = OTHER; note = 2'-O- methyl
  modified_base 9: mod_base = OTHER; note = 2'- fluoro
  modified_base 10: mod_base = OTHER; note = 2'-O- methyl
  modified_base 11: mod_base = OTHER; note = 2'- fluoro
  modified_base 12: mod_base = OTHER; note = 2'-O- methyl
  modified_base 13: mod_base = OTHER; note = 2'-O- methyl
  modified_base 14: mod_base = OTHER; note = 2'-O- methyl
  modified_base 15: mod_base = OTHER; note = 2'-O- methyl
  modified_base 16: mod_base = OTHER; note = 2'-O- methyl
  modified_base 17: mod_base = OTHER; note = 2'- fluoro
  modified_base 18: mod_base = OTHER; note = 2'-O- methyl
  modified_base 19: mod_base = OTHER; note = 2'-O- methyl
  modified_base 20: mod_base = OTHER; note = 2'-O- methyl
  modified_base 21: mod_base = OTHER; note = 2'-O- methyl
ttgggttttaaaattaaagta

SEQ ID NO: 398 - RNA, 21 nt, synthetic construct
  source 1..21: mol_type = other RNA
  modified_base 1: mod_base = OTHER; note = 2'-O- methyl, 3'- thiophosphate
  modified_base 2: mod_base = OTHER; note = 2'-O- methyl, 3'- thiophosphate
  modified_base 3: mod_base = OTHER; note = 2'-O- methyl
  modified_base 4: mod_base = OTHER; note = 2'-O- methyl
  modified_base 5: mod_base = OTHER; note = 2'-O- methyl
  modified_base 6: mod_base = OTHER; note = 2'-O- methyl
  modified_base 7: mod_base = OTHER; note = 2'- fluoro
  modified_base 8: mod_base = OTHER; note = 2'-O- methyl
  modified_base 9: mod_base = OTHER; note = 2'- fluoro
  modified_base 10: mod_base = OTHER; note = 2'- fluoro
  modified_base 11: mod_base = OTHER; note = 2'- fluoro
  modified_base 12: mod_base = OTHER; note = 2'-O- methyl
  modified_base 13: mod_base = OTHER; note = 2'-O- methyl
  modified_base 14: mod_base = OTHER; note = 2'-O- methyl
  modified_base 15: mod_base = OTHER; note = 2'-O- methyl
  modified_base 16: mod_base = OTHER; note = 2'-O- methyl
  modified_base 17: mod_base = OTHER; note = 2'- fluoro
  modified_base 18: mod_base = OTHER; note = 2'-O- methyl
  modified_base 19: mod_base = OTHER; note = 2'-O- methyl
  modified_base 20: mod_base = OTHER; note = 2'-O- methyl
  modified_base 21: mod_base = OTHER; note = 2'-O- methyl
ttgggttttaaaattaaagta

SEQ ID NO: 399 - RNA, 21 nt, synthetic construct
  source 1..21: mol_type = other RNA
  modified_base 1: mod_base = OTHER; note = 2'-O- methyl, 3'- thiophosphate
  modified_base 2: mod_base = OTHER; note = 2'-O- methyl, 3'- thiophosphate
  modified_base 3: mod_base = OTHER; note = 2'-O- methyl
  modified_base 4: mod_base = OTHER; note = 2'-O- methyl
  modified_base 5: mod_base = OTHER; note = 2'-O- methyl
  modified_base 6: mod_base = OTHER; note = 2'-O- methyl
  modified_base 7: mod_base = OTHER; note = 2'- fluoro
  modified_base 8: mod_base = OTHER; note = 2'-O- methyl
  modified_base 9: mod_base = OTHER; note = 2'- fluoro
  modified_base 10: mod_base = OTHER; note = 2'- fluoro
  modified_base 11: mod_base = OTHER; note = 2'- fluoro
  modified_base 12: mod_base = OTHER; note = 2'-O- methyl
  modified_base 13: mod_base = OTHER; note = 2'-O- methyl
  modified_base 14: mod_base = OTHER; note = 2'-O- methyl
  modified_base 15: mod_base = OTHER; note = 2'-O- methyl
  modified_base 16: mod_base = OTHER; note = 2'-O- methyl
  modified_base 17: mod_base = OTHER; note = 2'-O- methyl
  modified_base 18: mod_base = OTHER; note = 2'-O- methyl
  modified_base 19: mod_base = OTHER; note = 2'-O- methyl
  modified_base 20: mod_base = OTHER; note = 2'-O- methyl
  modified_base 21: mod_base = OTHER; note = 2'-O- methyl
ttgggttttaaaattaaagta

SEQ ID NO: 400 - RNA, 21 nt, synthetic construct
  source 1..21: mol_type = other RNA
  modified_base 1: mod_base = OTHER; note = 2'-O- methyl, 3'- thiophosphate
  modified_base 2: mod_base = OTHER; note = 2'-O- methyl, 3'- thiophosphate
  modified_base 3: mod_base = OTHER; note = 2'-O- methyl
  modified_base 4: mod_base = OTHER; note = 2'-O- methyl
  modified_base 5: mod_base = OTHER; note = 2'-O- methyl
  modified_base 6: mod_base = OTHER; note = 2'-O- methyl
  modified_base 7: mod_base = OTHER; note = 2'- fluoro
  modified_base 8: mod_base = OTHER; note = 2'-O- methyl
  modified_base 9: mod_base = OTHER; note = 2'- fluoro
  modified_base 10: mod_base = OTHER; note = 2'-O- methyl
  modified_base 11: mod_base = OTHER; note = 2'- fluoro
  modified_base 12: mod_base = OTHER; note = 2'-O- methyl
  modified_base 13: mod_base = OTHER; note = 2'-O- methyl
  modified_base 14: mod_base = OTHER; note = 2'-O- methyl
  modified_base 15: mod_base = OTHER; note = 2'-O- methyl
  modified_base 16: mod_base = OTHER; note = 2'-O- methyl
  modified_base 17: mod_base = OTHER; note = 2'- fluoro
  modified_base 18: mod_base = OTHER; note = 2'-O- methyl
  modified_base 19: mod_base = OTHER; note = 2'-O- methyl
  modified_base 20: mod_base = OTHER; note = 2'-O- methyl
  modified_base 21: mod_base = OTHER; note = 2'-O- methyl
ttcaagttgagaacaaaaatt

SEQ ID NO: 401 - RNA, 21 nt, synthetic construct
  source 1..21: mol_type = other RNA
  modified_base 1: mod_base = OTHER; note = 2'-O- methyl, 3'- thiophosphate
  modified_base 2: mod_base = OTHER; note = 2'-O- methyl, 3'- thiophosphate
  modified_base 3: mod_base = OTHER; note = 2'-O- methyl
  modified_base 4: mod_base = OTHER; note = 2'-O- methyl
  modified_base 5: mod_base = OTHER; note = 2'-O- methyl
  modified_base 6: mod_base = OTHER; note = 2'-O- methyl
  modified_base 7: mod_base = OTHER; note = 2'- fluoro
  modified_base 8: mod_base = OTHER; note = 2'-O- methyl
  modified_base 9: mod_base = OTHER; note = 2'- fluoro
  modified_base 10: mod_base = OTHER; note = 2'- fluoro
  modified_base 11: mod_base = OTHER; note = 2'- fluoro
  modified_base 12: mod_base = OTHER; note = 2'-O- methyl
  modified_base 13: mod_base = OTHER; note = 2'-O- methyl
  modified_base 14: mod_base = OTHER; note = 2'-O- methyl
  modified_base 15: mod_base = OTHER; note = 2'-O- methyl
  modified_base 16: mod_base = OTHER; note = 2'-O- methyl
  modified_base 17: mod_base = OTHER; note = 2'- fluoro
  modified_base 18: mod_base = OTHER; note = 2'-O- methyl
  modified_base 19: mod_base = OTHER; note = 2'-O- methyl
  modified_base 20: mod_base = OTHER; note = 2'-O- methyl
  modified_base 21: mod_base = OTHER; note = 2'-O- methyl
ttcaagttgagaacaaaaatt

SEQ ID NO: 402 - RNA, 21 nt, synthetic construct
  source 1..21: mol_type = other RNA
  modified_base 1: mod_base = OTHER; note = 2'-O- methyl, 3'- thiophosphate
  modified_base 2: mod_base = OTHER; note = 2'-O- methyl, 3'- thiophosphate
  modified_base 3: mod_base = OTHER; note = 2'-O- methyl
  modified_base 4: mod_base = OTHER; note = 2'-O- methyl
  modified_base 5: mod_base = OTHER; note = 2'-O- methyl
  modified_base 6: mod_base = OTHER; note = 2'-O- methyl
  modified_base 7: mod_base = OTHER; note = 2'- fluoro
  modified_base 8: mod_base = OTHER; note = 2'-O- methyl
  modified_base 9: mod_base = OTHER; note = 2'- fluoro
  modified_base 10: mod_base = OTHER; note = 2'- fluoro
  modified_base 11: mod_base = OTHER; note = 2'- fluoro
  modified_base 12: mod_base = OTHER; note = 2'-O- methyl
  modified_base 13: mod_base = OTHER; note = 2'-O- methyl
  modified_base 14: mod_base = OTHER; note = 2'-O- methyl
  modified_base 15: mod_base = OTHER; note = 2'-O- methyl
  modified_base 16: mod_base = OTHER; note = 2'-O- methyl
  modified_base 17: mod_base = OTHER; note = 2'-O- methyl
  modified_base 18: mod_base = OTHER; note = 2'-O- methyl
  modified_base 19: mod_base = OTHER; note = 2'-O- methyl
  modified_base 20: mod_base = OTHER; note = 2'-O- methyl
  modified_base 21: mod_base = OTHER; note = 2'-O- methyl
ttcaagttgagaacaaaaatt

SEQ ID NO: 403 - RNA, 21 nt, synthetic construct
  source 1..21: mol_type = other RNA
  modified_base 1: mod_base = OTHER; note = 2'-O- methyl, 3'- thiophosphate
  modified_base 2: mod_base = OTHER; note = 2'-O- methyl, 3'- thiophosphate
  modified_base 3: mod_base = OTHER; note = 2'-O- methyl
  modified_base 4: mod_base = OTHER; note = 2'-O- methyl
  modified_base 5: mod_base = OTHER; note = 2'-O- methyl
  modified_base 6: mod_base = OTHER; note = 2'-O- methyl
  modified_base 7: mod_base = OTHER; note = 2'- fluoro
  modified_base 8: mod_base = OTHER; note = 2'-O- methyl
  modified_base 9: mod_base = OTHER; note = 2'- fluoro
  modified_base 10: mod_base = OTHER; note = 2'-O- methyl
  modified_base 11: mod_base = OTHER; note = 2'- fluoro
  modified_base 12: mod_base = OTHER; note = 2'-O- methyl
  modified_base 13: mod_base = OTHER; note = 2'-O- methyl
  modified_base 14: mod_base = OTHER; note = 2'-O- methyl
  modified_base 15: mod_base = OTHER; note = 2'-O- methyl
  modified_base 16: mod_base = OTHER; note = 2'-O- methyl
  modified_base 17: mod_base = OTHER; note = 2'- fluoro
  modified_base 18: mod_base = OTHER; note = 2'-O- methyl
  modified_base 19: mod_base = OTHER; note = 2'-O- methyl
  modified_base 20: mod_base = OTHER; note = 2'-O- methyl
  modified_base 21: mod_base = OTHER; note = 2'-O- methyl
ccttttcaagttgagaacaaa

SEQ ID NO: 404 - RNA, 21 nt, synthetic construct
  source 1..21: mol_type = other RNA
  modified_base 1: mod_base = OTHER; note = 2'-O- methyl, 3'- thiophosphate
  modified_base 2: mod_base = OTHER; note = 2'-O- methyl, 3'- thiophosphate
  modified_base 3: mod_base = OTHER; note = 2'-O- methyl
  modified_base 4: mod_base = OTHER; note = 2'-O- methyl
  modified_base 5: mod_base = OTHER; note = 2'-O- methyl
  modified_base 6: mod_base = OTHER; note = 2'-O- methyl
  modified_base 7: mod_base = OTHER; note = 2'- fluoro
  modified_base 8: mod_base = OTHER; note = 2'-O- methyl
  modified_base 9: mod_base = OTHER; note = 2'- fluoro
  modified_base 10: mod_base = OTHER; note = 2'- fluoro
  modified_base 11: mod_base = OTHER; note = 2'- fluoro
  modified_base 12: mod_base = OTHER; note = 2'-O- methyl
  modified_base 13: mod_base = OTHER; note = 2'-O- methyl
  modified_base 14: mod_base = OTHER; note = 2'-O- methyl
  modified_base 15: mod_base = OTHER; note = 2'-O- methyl
  modified_base 16: mod_base = OTHER; note = 2'-O- methyl
  modified_base 17: mod_base = OTHER; note = 2'- fluoro
  modified_base 18: mod_base = OTHER; note = 2'-O- methyl
  modified_base 19: mod_base = OTHER; note = 2'-O- methyl
  modified_base 20: mod_base = OTHER; note = 2'-O- methyl
  modified_base 21: mod_base = OTHER; note = 2'-O- methyl
ccttttcaagttgagaacaaa

SEQ ID NO: 405 - RNA, 21 nt, synthetic construct
  source 1..21: mol_type = other RNA
  modified_base 1: mod_base = OTHER; note = 2'-O- methyl, 3'- thiophosphate
  modified_base 2: mod_base = OTHER; note = 2'-O- methyl, 3'- thiophosphate
  modified_base 3: mod_base = OTHER; note = 2'-O- methyl
  modified_base 4: mod_base = OTHER; note = 2'-O- methyl
  modified_base 5: mod_base = OTHER; note = 2'-O- methyl
  modified_base 6: mod_base = OTHER; note = 2'-O- methyl
  modified_base 7: mod_base = OTHER; note = 2'- fluoro
  modified_base 8: mod_base = OTHER; note = 2'-O- methyl
  modified_base 9: mod_base = OTHER; note = 2'- fluoro
  modified_base 10: mod_base = OTHER; note = 2'- fluoro
  modified_base 11: mod_base = OTHER; note = 2'- fluoro
  modified_base 12: mod_base = OTHER; note = 2'-O- methyl
  modified_base 13: mod_base = OTHER; note = 2'-O- methyl
  modified_base 14: mod_base = OTHER; note = 2'-O- methyl
  modified_base 15: mod_base = OTHER; note = 2'-O- methyl
  modified_base 16: mod_base = OTHER; note = 2'-O- methyl
  modified_base 17: mod_base = OTHER; note = 2'-O- methyl
  modified_base 18: mod_base = OTHER; note = 2'-O- methyl
  modified_base 19: mod_base = OTHER; note = 2'-O- methyl
  modified_base 20: mod_base = OTHER; note = 2'-O- methyl
  modified_base 21: mod_base = OTHER; note = 2'-O- methyl
ccttttcaagttgagaacaaa

SEQ ID NO: 406 - RNA, 21 nt, synthetic construct
  source 1..21: mol_type = other RNA
  modified_base 1: mod_base = OTHER; note = 2'-O- methyl, 3'- thiophosphate
  modified_base 2: mod_base = OTHER; note = 2'-O- methyl, 3'- thiophosphate
  modified_base 3: mod_base = OTHER; note = 2'-O- methyl
  modified_base 4: mod_base = OTHER; note = 2'-O- methyl
  modified_base 5: mod_base = OTHER; note = 2'-O- methyl
  modified_base 6: mod_base = OTHER; note = 2'-O- methyl
  modified_base 7: mod_base = OTHER; note = 2'- fluoro
  modified_base 8: mod_base = OTHER; note = 2'-O- methyl
  modified_base 9: mod_base = OTHER; note = 2'- fluoro
  modified_base 10: mod_base = OTHER; note = 2'-O- methyl
  modified_base 11: mod_base = OTHER; note = 2'- fluoro
  modified_base 12: mod_base = OTHER; note = 2'-O- methyl
  modified_base 13: mod_base = OTHER; note = 2'-O- methyl
  modified_base 14: mod_base = OTHER; note = 2'-O- methyl
  modified_base 15: mod_base = OTHER; note = 2'-O- methyl
  modified_base 16: mod_base = OTHER; note = 2'-O- methyl
  modified_base 17: mod_base = OTHER; note = 2'- fluoro
  modified_base 18: mod_base = OTHER; note = 2'-O- methyl
  modified_base 19: mod_base = OTHER; note = 2'-O- methyl
  modified_base 20: mod_base = OTHER; note = 2'-O- methyl
  modified_base 21: mod_base = OTHER; note = 2'-O- methyl
ccttttcttctaatgagtcga

SEQ ID NO: 407 - RNA, 21 nt, synthetic construct
  source 1..21: mol_type = other RNA
  modified_base 1: mod_base = OTHER; note = 2'-O- methyl, 3'- thiophosphate
  modified_base 2: mod_base = OTHER; note = 2'-O- methyl, 3'- thiophosphate
  modified_base 3: mod_base = OTHER; note = 2'-O- methyl
  modified_base 4: mod_base = OTHER; note = 2'-O- methyl
  modified_base 5: mod_base = OTHER; note = 2'-O- methyl
  modified_base 6: mod_base = OTHER; note = 2'-O- methyl
  modified_base 7: mod_base = OTHER; note = 2'- fluoro
  modified_base 8: mod_base = OTHER; note = 2'-O- methyl
  modified_base 9: mod_base = OTHER; note = 2'- fluoro
  modified_base 10: mod_base = OTHER; note = 2'- fluoro
  modified_base 11: mod_base = OTHER; note = 2'- fluoro
  modified_base 12: mod_base = OTHER; note = 2'-O- methyl
  modified_base 13: mod_base = OTHER; note = 2'-O- methyl
  modified_base 14: mod_base = OTHER; note = 2'-O- methyl
  modified_base 15: mod_base = OTHER; note = 2'-O- methyl
  modified_base 16: mod_base = OTHER; note = 2'-O- methyl
  modified_base 17: mod_base = OTHER; note = 2'- fluoro
  modified_base 18: mod_base = OTHER; note = 2'-O- methyl
  modified_base 19: mod_base = OTHER; note = 2'-O- methyl
  modified_base 20: mod_base = OTHER; note = 2'-O- methyl
  modified_base 21: mod_base = OTHER; note = 2'-O- methyl
ccttttcttctaatgagtcga

SEQ ID NO: 408 - RNA, 21 nt, synthetic construct
  source 1..21: mol_type = other RNA
  modified_base 1: mod_base = OTHER; note = 2'-O- methyl, 3'- thiophosphate
  modified_base 2: mod_base = OTHER; note = 2'-O- methyl, 3'- thiophosphate
  modified_base 3: mod_base = OTHER; note = 2'-O- methyl
  modified_base 4: mod_base = OTHER; note = 2'-O- methyl
  modified_base 5: mod_base = OTHER; note = 2'-O- methyl
  modified_base 6: mod_base = OTHER; note = 2'-O- methyl
  modified_base 7: mod_base = OTHER; note = 2'- fluoro
  modified_base 8: mod_base = OTHER; note = 2'-O- methyl
  modified_base 9: mod_base = OTHER; note = 2'- fluoro
  modified_base 10: mod_base = OTHER; note = 2'- fluoro
  modified_base 11: mod_base = OTHER; note = 2'- fluoro
  modified_base 12: mod_base = OTHER; note = 2'-O- methyl
  modified_base 13: mod_base = OTHER; note = 2'-O- methyl
  modified_base 14: mod_base = OTHER; note = 2'-O- methyl
  modified_base 15: mod_base = OTHER; note = 2'-O- methyl
  modified_base 16: mod_base = OTHER; note = 2'-O- methyl
  modified_base 17: mod_base = OTHER; note = 2'-O- methyl
  modified_base 18: mod_base = OTHER; note = 2'-O- methyl
  modified_base 19: mod_base = OTHER; note = 2'-O- methyl
  modified_base 20: mod_base = OTHER; note = 2'-O- methyl
  modified_base 21: mod_base = OTHER; note = 2'-O- methyl
ccttttcttctaatgagtcga

SEQ ID NO: 409 - RNA, 21 nt, synthetic construct
  source 1..21: mol_type = other RNA
  modified_base 1: mod_base = OTHER; note = 2'-O- methyl, 3'- thiophosphate
  modified_base 2: mod_base = OTHER; note = 2'-O- methyl, 3'- thiophosphate
  modified_base 3: mod_base = OTHER; note = 2'-O- methyl
  modified_base 4: mod_base = OTHER; note = 2'-O- methyl
  modified_base 5: mod_base = OTHER; note = 2'-O- methyl
  modified_base 6: mod_base = OTHER; note = 2'-O- methyl
  modified_base 7: mod_base = OTHER; note = 2'- fluoro
  modified_base 8: mod_base = OTHER; note = 2'-O- methyl
  modified_base 9: mod_base = OTHER; note = 2'- fluoro
  modified_base 10: mod_base = OTHER; note = 2'-O- methyl
  modified_base 11: mod_base = OTHER; note = 2'- fluoro
  modified_base 12: mod_base = OTHER; note = 2'-O- methyl
  modified_base 13: mod_base = OTHER; note = 2'-O- methyl
  modified_base 14: mod_base = OTHER; note = 2'-O- methyl
  modified_base 15: mod_base = OTHER; note = 2'-O- methyl
  modified_base 16: mod_base = OTHER; note = 2'-O- methyl
  modified_base 17: mod_base = OTHER; note = 2'- fluoro
  modified_base 18: mod_base = OTHER; note = 2'-O- methyl
  modified_base 19: mod_base = OTHER; note = 2'-O- methyl
  modified_base 20: mod_base = OTHER; note = 2'-O- methyl
  modified_base 21: mod_base = OTHER; note = 2'-O- methyl
tgggttttaaaattaaagtat

SEQ ID NO: 410 - RNA, 21 nt, synthetic construct
  source 1..21: mol_type = other RNA
  modified_base 1: mod_base = OTHER; note = 2'-O- methyl, 3'- thiophosphate
  modified_base 2: mod_base = OTHER; note = 2'-O- methyl, 3'- thiophosphate
  modified_base 3: mod_base = OTHER; note = 2'-O- methyl
  modified_base 4: mod_base = OTHER; note = 2'-O- methyl
  modified_base 5: mod_base = OTHER; note = 2'-O- methyl
  modified_base 6: mod_base = OTHER; note = 2'-O- methyl
  modified_base 7: mod_base = OTHER; note = 2'- fluoro
  modified_base 8: mod_base = OTHER; note = 2'-O- methyl
  modified_base 9: mod_base = OTHER; note = 2'- fluoro
  modified_base 10: mod_base = OTHER; note = 2'- fluoro
  modified_base 11: mod_base = OTHER; note = 2'- fluoro
  modified_base 12: mod_base = OTHER; note = 2'-O- methyl
  modified_base 13: mod_base = OTHER; note = 2'-O- methyl
  modified_base 14: mod_base = OTHER; note = 2'-O- methyl
  modified_base 15: mod_base = OTHER; note = 2'-O- methyl
  modified_base 16: mod_base = OTHER; note = 2'-O- methyl
  modified_base 17: mod_base = OTHER; note = 2'- fluoro
  modified_base 18: mod_base = OTHER; note = 2'-O- methyl
  modified_base 19: mod_base = OTHER; note = 2'-O- methyl
  modified_base 20: mod_base = OTHER; note = 2'-O- methyl
  modified_base 21: mod_base = OTHER; note = 2'-O- methyl
tgggttttaaaattaaagtat

SEQ ID NO: 411 - RNA, 21 nt, synthetic construct
  source 1..21: mol_type = other RNA
  modified_base 1: mod_base = OTHER; note = 2'-O- methyl, 3'- thiophosphate
  modified_base 2: mod_base = OTHER; note = 2'-O- methyl, 3'- thiophosphate
  modified_base 3: mod_base = OTHER; note = 2'-O- methyl
  modified_base 4: mod_base = OTHER; note = 2'-O- methyl
  modified_base 5: mod_base = OTHER; note = 2'-O- methyl
  modified_base 6: mod_base = OTHER; note = 2'-O- methyl
  modified_base 7: mod_base = OTHER; note = 2'- fluoro
  modified_base 8: mod_base = OTHER; note = 2'-O- methyl
  modified_base 9: mod_base = OTHER; note = 2'- fluoro
  modified_base 10: mod_base = OTHER; note = 2'-O- methyl
  modified_base 11: mod_base = OTHER; note = 2'- fluoro
  modified_base 12: mod_base = OTHER; note = 2'-O- methyl
  modified_base 13: mod_base = OTHER; note = 2'-O- methyl
  modified_base 14: mod_base = OTHER; note = 2'-O- methyl
  modified_base 15: mod_base = OTHER; note = 2'-O- methyl
  modified_base 16: mod_base = OTHER; note = 2'-O- methyl
  modified_base 17: mod_base = OTHER; note = 2'- fluoro
  modified_base 18: mod_base = OTHER; note = 2'-O- methyl
  modified_base 19: mod_base = OTHER; note = 2'-O- methyl
  modified_base 20: mod_base = OTHER; note = 2'-O- methyl
  modified_base 21: mod_base = OTHER; note = 2'-O- methyl
gtttgtgaaacaaaaaagtgt

SEQ ID NO: 412 - RNA, 21 nt, synthetic construct
  source 1..21: mol_type = other RNA
  modified_base 1: mod_base = OTHER; note = 2'-O- methyl, 3'- thiophosphate
  modified_base 2: mod_base = OTHER; note = 2'-O- methyl, 3'- thiophosphate
  modified_base 3: mod_base = OTHER; note = 2'-O- methyl
  modified_base 4: mod_base = OTHER; note = 2'-O- methyl
  modified_base 5: mod_base = OTHER; note = 2'-O- methyl
  modified_base 6: mod_base = OTHER; note = 2'-O- methyl
  modified_base 7: mod_base = OTHER; note = 2'- fluoro
  modified_base 8: mod_base = OTHER; note = 2'-O- methyl
  modified_base 9: mod_base = OTHER; note = 2'- fluoro
  modified_base 10: mod_base = OTHER; note = 2'- fluoro
  modified_base 11: mod_base = OTHER; note = 2'- fluoro
  modified_base 12: mod_base = OTHER; note = 2'-O- methyl
  modified_base 13: mod_base = OTHER; note = 2'-O- methyl
  modified_base 14: mod_base = OTHER; note = 2'-O- methyl
  modified_base 15: mod_base = OTHER; note = 2'-O- methyl
  modified_base 16: mod_base = OTHER; note = 2'-O- methyl
  modified_base 17: mod_base = OTHER; note = 2'- fluoro
  modified_base 18: mod_base = OTHER; note = 2'-O- methyl
  modified_base 19: mod_base = OTHER; note = 2'-O- methyl
  modified_base 20: mod_base = OTHER; note = 2'-O- methyl
  modified_base 21: mod_base = OTHER; note = 2'-O- methyl
gtttgtgaaacaaaaaagtgt

SEQ ID NO: 413 - RNA, 21 nt, synthetic construct
  source 1..21: mol_type = other RNA
  modified_base 1: mod_base = OTHER; note = 2'-O- methyl, 3'- thiophosphate
  modified_base 2: mod_base = OTHER; note = 2'-O- methyl, 3'- thiophosphate
  modified_base 3: mod_base = OTHER; note = 2'-O- methyl
  modified_base 4: mod_base = OTHER; note = 2'-O- methyl
  modified_base 5: mod_base = OTHER; note = 2'-O- methyl
  modified_base 6: mod_base = OTHER; note = 2'-O- methyl
  modified_base 7: mod_base = OTHER; note = 2'- fluoro
  modified_base 8: mod_base = OTHER; note = 2'-O- methyl
  modified_base 9: mod_base = OTHER; note = 2'- fluoro
  modified_base 10: mod_base = OTHER; note = 2'- fluoro
  modified_base 11: mod_base = OTHER; note = 2'- fluoro
  modified_base 12: mod_base = OTHER; note = 2'-O- methyl
  modified_base 13: mod_base = OTHER; note = 2'-O- methyl
  modified_base 14: mod_base = OTHER; note = 2'-O- methyl
  modified_base 15: mod_base = OTHER; note = 2'-O- methyl
  modified_base 16: mod_base = OTHER; note = 2'-O- methyl
  modified_base 17: mod_base = OTHER; note = 2'-O- methyl
  modified_base 18: mod_base = OTHER; note = 2'-O- methyl
  modified_base 19: mod_base = OTHER; note = 2'-O- methyl
  modified_base 20: mod_base = OTHER; note = 2'-O- methyl
  modified_base 21: mod_base = OTHER; note = 2'-O- methyl
gtttgtgaaacaaaaaagtgt

SEQ ID NO: 414 - RNA, 21 nt, synthetic construct
  source 1..21: mol_type = other RNA
  modified_base 1: mod_base = OTHER; note = 2'-O- methyl, 3'- thiophosphate
  modified_base 2: mod_base = OTHER; note = 2'-O- methyl, 3'- thiophosphate
  modified_base 3: mod_base = OTHER; note = 2'-O- methyl
  modified_base 4: mod_base = OTHER; note = 2'-O- methyl
  modified_base 5: mod_base = OTHER; note = 2'-O- methyl
  modified_base 6: mod_base = OTHER; note = 2'-O- methyl
  modified_base 7: mod_base = OTHER; note = 2'- fluoro
  modified_base 8: mod_base = OTHER; note = 2'-O- methyl
  modified_base 9: mod_base = OTHER; note = 2'- fluoro
  modified_base 10: mod_base = OTHER; note = 2'-O- methyl
  modified_base 11: mod_base = OTHER; note = 2'- fluoro
  modified_base 12: mod_base = OTHER; note = 2'-O- methyl
  modified_base 13: mod_base = OTHER; note = 2'-O- methyl
  modified_base 14: mod_base = OTHER; note = 2'-O- methyl
  modified_base 15: mod_base = OTHER; note = 2'-O- methyl
  modified_base 16: mod_base = OTHER; note = 2'-O- methyl
  modified_base 17: mod_base = OTHER; note = 2'- fluoro
  modified_base 18: mod_base = OTHER; note = 2'-O- methyl
  modified_base 19: mod_base = OTHER; note = 2'-O- methyl
  modified_base 20: mod_base = OTHER; note = 2'-O- methyl
  modified_base 21: mod_base = OTHER; note = 2'-O- methyl
gttttaaaattaaagtataca

SEQ ID NO: 415 - RNA, 21 nt, synthetic construct
  source 1..21: mol_type = other RNA
  modified_base 1: mod_base = OTHER; note = 2'-O- methyl, 3'- thiophosphate
  modified_base 2: mod_base = OTHER; note = 2'-O- methyl, 3'- thiophosphate
  modified_base 3: mod_base = OTHER; note = 2'-O- methyl
  modified_base 4: mod_base = OTHER; note = 2'-O- methyl
  modified_base 5: mod_base = OTHER; note = 2'-O- methyl
  modified_base 6: mod_base = OTHER; note = 2'-O- methyl
  modified_base 7: mod_base = OTHER; note = 2'- fluoro
  modified_base 8: mod_base = OTHER; note = 2'-O- methyl
  modified_base 9: mod_base = OTHER; note = 2'- fluoro
  modified_base 10: mod_base = OTHER; note = 2'- fluoro
  modified_base 11: mod_base = OTHER; note = 2'- fluoro
  modified_base 12: mod_base = OTHER; note = 2'-O- methyl
  modified_base 13: mod_base = OTHER; note = 2'-O- methyl
  modified_base 14: mod_base = OTHER; note = 2'-O- methyl
  modified_base 15: mod_base = OTHER; note = 2'-O- methyl
  modified_base 16: mod_base = OTHER; note = 2'-O- methyl
  modified_base 17: mod_base = OTHER; note = 2'- fluoro
  modified_base 18: mod_base = OTHER; note = 2'-O- methyl
  modified_base 19: mod_base = OTHER; note = 2'-O- methyl
  modified_base 20: mod_base = OTHER; note = 2'-O- methyl
  modified_base 21: mod_base = OTHER; note = 2'-O- methyl
gttttaaaattaaagtataca

SEQ ID NO: 416 - RNA, 21 nt, synthetic construct
  source 1..21: mol_type = other RNA
  modified_base 1: mod_base = OTHER; note = 2'-O- methyl, 3'- thiophosphate
  modified_base 2: mod_base = OTHER; note = 2'-O- methyl, 3'- thiophosphate
  modified_base 3: mod_base = OTHER; note = 2'-O- methyl
  modified_base 4: mod_base = OTHER; note = 2'-O- methyl
  modified_base 5: mod_base = OTHER; note = 2'-O- methyl
  modified_base 6: mod_base = OTHER; note = 2'-O- methyl
  modified_base 7: mod_base = OTHER; note = 2'- fluoro
  modified_base 8: mod_base = OTHER; note = 2'-O- methyl
  modified_base 9: mod_base = OTHER; note = 2'- fluoro
  modified_base 10: mod_base = OTHER; note = 2'-O- methyl
  modified_base 11: mod_base = OTHER; note = 2'- fluoro
  modified_base 12: mod_base = OTHER; note = 2'-O- methyl
  modified_base 13: mod_base = OTHER; note = 2'-O- methyl
  modified_base 14: mod_base = OTHER; note = 2'-O- methyl
  modified_base 15: mod_base = OTHER; note = 2'-O- methyl
  modified_base 16: mod_base = OTHER; note = 2'-O- methyl
  modified_base 17: mod_base = OTHER; note = 2'- fluoro
  modified_base 18: mod_base = OTHER; note = 2'-O- methyl
  modified_base 19: mod_base = OTHER; note = 2'-O- methyl
  modified_base 20: mod_base = OTHER; note = 2'-O- methyl
  modified_base 21: mod_base = OTHER; note = 2'-O- methyl
ttgtgaaacaaaaaagtgtta

SEQ ID NO: 417 - RNA, 21 nt, synthetic construct
  source 1..21: mol_type = other RNA
  modified_base 1: mod_base = OTHER; note = 2'-O- methyl, 3'- thiophosphate
  modified_base 2: mod_base = OTHER; note = 2'-O- methyl, 3'- thiophosphate
  modified_base 3: mod_base = OTHER; note = 2'-O- methyl
  modified_base 4: mod_base = OTHER; note = 2'-O- methyl
  modified_base 5: mod_base = OTHER; note = 2'-O- methyl
  modified_base 6: mod_base = OTHER; note = 2'-O- methyl
  modified_base 7: mod_base = OTHER; note = 2'- fluoro
  modified_base 8: mod_base = OTHER; note = 2'-O- methyl
  modified_base 9: mod_base = OTHER; note = 2'- fluoro
  modified_base 10: mod_base = OTHER; note = 2'- fluoro
  modified_base 11: mod_base = OTHER; note = 2'- fluoro
  modified_base 12: mod_base = OTHER; note = 2'-O- methyl
  modified_base 13: mod_base = OTHER; note = 2'-O- methyl
  modified_base 14: mod_base = OTHER; note = 2'-O- methyl
  modified_base 15: mod_base = OTHER; note = 2'-O- methyl
  modified_base 16: mod_base = OTHER; note = 2'-O- methyl
  modified_base 17: mod_base = OTHER; note = 2'- fluoro
  modified_base 18: mod_base = OTHER; note = 2'-O- methyl
  modified_base 19: mod_base = OTHER; note = 2'-O- methyl
  modified_base 20: mod_base = OTHER; note = 2'-O- methyl
  modified_base 21: mod_base = OTHER; note = 2'-O- methyl
ttgtgaaacaaaaaagtgtta

SEQ ID NO: 418 - RNA, 21 nt, synthetic construct
  source 1..21: mol_type = other RNA
  modified_base 1: mod_base = OTHER; note = 2'-O- methyl, 3'- thiophosphate
  modified_base 2: mod_base = OTHER; note = 2'-O- methyl, 3'- thiophosphate
  modified_base 3: mod_base = OTHER; note = 2'-O- methyl
  modified_base 4: mod_base = OTHER; note = 2'-O- methyl
  modified_base 5: mod_base = OTHER; note = 2'-O- methyl
  modified_base 6: mod_base = OTHER; note = 2'-O- methyl
  modified_base 7: mod_base = OTHER; note = 2'- fluoro
  modified_base 8: mod_base = OTHER; note = 2'-O- methyl
  modified_base 9: mod_base = OTHER; note = 2'- fluoro
  modified_base 10: mod_base = OTHER; note = 2'-O- methyl
  modified_base 11: mod_base = OTHER; note = 2'- fluoro
  modified_base 12: mod_base = OTHER; note = 2'-O- methyl
  modified_base 13: mod_base = OTHER; note = 2'-O- methyl
  modified_base 14: mod_base = OTHER; note = 2'-O- methyl
  modified_base 15: mod_base = OTHER; note = 2'-O- methyl
  modified_base 16: mod_base = OTHER; note = 2'-O- methyl
  modified_base 17: mod_base = OTHER; note = 2'- fluoro
  modified_base 18: mod_base = OTHER; note = 2'-O- methyl
  modified_base 19: mod_base = OTHER; note = 2'-O- methyl
  modified_base 20: mod_base = OTHER; note = 2'-O- methyl
  modified_base 21: mod_base = OTHER; note = 2'-O- methyl
gaaacaaaaaagtgttccctt

SEQ ID NO: 419 - RNA, 21 nt, synthetic construct
  source 1..21: mol_type = other RNA
  modified_base 1: mod_base = OTHER; note = 2'-O- methyl, 3'- thiophosphate
  modified_base 2: mod_base = OTHER; note = 2'-O- methyl, 3'- thiophosphate
  modified_base 3: mod_base = OTHER; note = 2'-O- methyl
  modified_base 4: mod_base = OTHER; note = 2'-O- methyl
  modified_base 5: mod_base = OTHER; note = 2'-O- methyl
  modified_base 6: mod_base = OTHER; note = 2'-O- methyl
  modified_base 7: mod_base = OTHER; note = 2'- fluoro
  modified_base 8: mod_base = OTHER; note = 2'-O- methyl
  modified_base 9: mod_base = OTHER; note = 2'- fluoro
  modified_base 10: mod_base = OTHER; note = 2'- fluoro
  modified_base 11: mod_base = OTHER; note = 2'- fluoro
  modified_base 12: mod_base = OTHER; note = 2'-O- methyl
  modified_base 13: mod_base = OTHER; note = 2'-O- methyl
  modified_base 14: mod_base = OTHER; note = 2'-O- methyl
  modified_base 15: mod_base = OTHER; note = 2'-O- methyl
  modified_base 16: mod_base = OTHER; note = 2'-O- methyl
  modified_base 17: mod_base = OTHER; note = 2'- fluoro
  modified_base 18: mod_base = OTHER; note = 2'-O- methyl
  modified_base 19: mod_base = OTHER; note = 2'-O- methyl
  modified_base 20: mod_base = OTHER; note = 2'-O- methyl
  modified_base 21: mod_base = OTHER; note = 2'-O- methyl
gaaacaaaaaagtgttccctt

SEQ ID NO: 420 - RNA, 20 nt, synthetic construct
  source 1..20: mol_type = other RNA
  modified_base 1: mod_base = OTHER; note = 2'-O- methyl, 3'- thiophosphate
  modified_base 2: mod_base = OTHER; note = 2'-O- methyl, 3'- thiophosphate
  modified_base 3: mod_base = OTHER; note = 2'-O- methyl
  modified_base 4: mod_base = OTHER; note = 2'-O- methyl
  modified_base 5: mod_base = OTHER; note = 2'-O- methyl
  modified_base 6: mod_base = OTHER; note = 2'- fluoro
  modified_base 7: mod_base = OTHER; note = 2'-O- methyl
  modified_base 8: mod_base = OTHER; note = 2'- fluoro
  modified_base 9: mod_base = OTHER; note = 2'-O- methyl
  modified_base 10: mod_base = OTHER; note = 2'- fluoro
  modified_base 11: mod_base = OTHER; note = 2'-O- methyl
  modified_base 12: mod_base = OTHER; note = 2'-O- methyl
  modified_base 13: mod_base = OTHER; note = 2'-O- methyl
  modified_base 14: mod_base = OTHER; note = 2'-O- methyl
  modified_base 15: mod_base = OTHER; note = 2'-O- methyl
  modified_base 16: mod_base = OTHER; note = 2'- fluoro
  modified_base 17: mod_base = OTHER; note = 2'-O- methyl
  modified_base 18: mod_base = OTHER; note = 2'-O- methyl
  modified_base 19: mod_base = OTHER; note = 2'-O- methyl
  modified_base 20: mod_base = OTHER; note = 2'-O- methyl
cttctaatgagtcgacttta

SEQ ID NO: 421 - RNA, 20 nt, synthetic construct
  source 1..20: mol_type = other RNA
  modified_base 1: mod_base = OTHER; note = 2'-O- methyl, 3'- thiophosphate
  modified_base 2: mod_base = OTHER; note = 2'-O- methyl, 3'- thiophosphate
  modified_base 3: mod_base = OTHER; note = 2'-O- methyl
  modified_base 4: mod_base = OTHER; note = 2'-O- methyl
  modified_base 5: mod_base = OTHER; note = 2'-O- methyl
  modified_base 6: mod_base = OTHER; note = 2'- fluoro
  modified_base 7: mod_base = OTHER; note = 2'-O- methyl
  modified_base 8: mod_base = OTHER; note = 2'- fluoro
  modified_base 9: mod_base = OTHER; note = 2'- fluoro
  modified_base 10: mod_base = OTHER; note = 2'- fluoro
  modified_base 11: mod_base = OTHER; note = 2'-O- methyl
  modified_base 12: mod_base = OTHER; note = 2'-O- methyl
  modified_base 13: mod_base = OTHER; note = 2'-O- methyl
  modified_base 14: mod_base = OTHER; note = 2'-O- methyl
  modified_base 15: mod_base = OTHER; note = 2'-O- methyl
  modified_base 16: mod_base = OTHER; note = 2'- fluoro
  modified_base 17: mod_base = OTHER; note = 2'-O- methyl
  modified_base 18: mod_base = OTHER; note = 2'-O- methyl
  modified_base 19: mod_base = OTHER; note = 2'-O- methyl
  modified_base 20: mod_base = OTHER; note = 2'-O- methyl
cttctaatgagtcgacttta

SEQ ID NO: 422 - RNA, 20 nt, synthetic construct
  source 1..20: mol_type = other RNA
  modified_base 1: mod_base = OTHER; note = 2'-O- methyl, 3'- thiophosphate
  modified_base 2: mod_base = OTHER; note = 2'-O- methyl, 3'- thiophosphate
  modified_base 3: mod_base = OTHER; note = 2'-O- methyl
  modified_base 4: mod_base = OTHER; note = 2'-O- methyl
  modified_base 5: mod_base = OTHER; note = 2'-O- methyl
  modified_base 6: mod_base = OTHER; note = 2'- fluoro
  modified_base 7: mod_base = OTHER; note = 2'-O- methyl
  modified_base 8: mod_base = OTHER; note = 2'- fluoro
  modified_base 9: mod_base = OTHER; note = 2'- fluoro
  modified_base 10: mod_base = OTHER; note = 2'- fluoro
  modified_base 11: mod_base = OTHER; note = 2'-O- methyl
  modified_base 12: mod_base = OTHER; note = 2'-O- methyl
  modified_base 13: mod_base = OTHER; note = 2'-O- methyl
  modified_base 14: mod_base = OTHER; note = 2'-O- methyl
  modified_base 15: mod_base = OTHER; note = 2'-O- methyl
  modified_base 16: mod_base = OTHER; note = 2'-O- methyl
  modified_base 17: mod_base = OTHER; note = 2'-O- methyl
  modified_base 18: mod_base = OTHER; note = 2'-O- methyl
  modified_base 19: mod_base = OTHER; note = 2'-O- methyl
  modified_base 20: mod_base = OTHER; note = 2'-O- methyl
cttctaatgagtcgacttta

SEQ ID NO: 423 - RNA, 20 nt, synthetic construct
  source 1..20: mol_type = other RNA
  modified_base 1: mod_base = OTHER; note = 2'-O- methyl, 3'- thiophosphate
  modified_base 2: mod_base = OTHER; note = 2'-O- methyl, 3'- thiophosphate
  modified_base 3: mod_base = OTHER; note = 2'-O- methyl
  modified_base 4: mod_base = OTHER; note = 2'-O- methyl
  modified_base 5: mod_base = OTHER; note = 2'-O- methyl
  modified_base 6: mod_base = OTHER; note = 2'- fluoro
  modified_base 7: mod_base = OTHER; note = 2'-O- methyl
  modified_base 8: mod_base = OTHER; note = 2'- fluoro
  modified_base 9: mod_base = OTHER; note = 2'-O- methyl
  modified_base 10: mod_base = OTHER; note = 2'- fluoro
  modified_base 11: mod_base = OTHER; note = 2'-O- methyl
  modified_base 12: mod_base = OTHER; note = 2'-O- methyl
  modified_base 13: mod_base = OTHER; note = 2'-O- methyl
  modified_base 14: mod_base = OTHER; note = 2'-O- methyl
  modified_base 15: mod_base = OTHER; note = 2'-O- methyl
  modified_base 16: mod_base = OTHER; note = 2'- fluoro
  modified_base 17: mod_base = OTHER; note = 2'-O- methyl
  modified_base 18: mod_base = OTHER; note = 2'-O- methyl
  modified_base 19: mod_base = OTHER; note = 2'-O- methyl
  modified_base 20: mod_base = OTHER; note = 2'-O- methyl
ccaccttttcttctaatgaa

SEQ ID NO: 424 - RNA, 20 nt, synthetic construct
  source 1..20: mol_type = other RNA
  modified_base 1: mod_base = OTHER; note = 2'-O- methyl, 3'- thiophosphate
  modified_base 2: mod_base = OTHER; note = 2'-O- methyl, 3'- thiophosphate
  modified_base 3: mod_base = OTHER; note = 2'-O- methyl
  modified_base 4: mod_base = OTHER; note = 2'-O- methyl
  modified_base 5: mod_base = OTHER; note = 2'-O- methyl
  modified_base 6: mod_base = OTHER; note = 2'- fluoro
  modified_base 7: mod_base = OTHER; note = 2'-O- methyl
  modified_base 8: mod_base = OTHER; note = 2'- fluoro
  modified_base 9: mod_base = OTHER; note = 2'- fluoro
  modified_base 10: mod_base = OTHER; note = 2'- fluoro
  modified_base 11: mod_base = OTHER; note = 2'-O- methyl
  modified_base 12: mod_base = OTHER; note = 2'-O- methyl
  modified_base 13: mod_base = OTHER; note = 2'-O- methyl
  modified_base 14: mod_base = OTHER; note = 2'-O- methyl
  modified_base 15: mod_base = OTHER; note = 2'-O- methyl
  modified_base 16: mod_base = OTHER; note = 2'- fluoro
  modified_base 17: mod_base = OTHER; note = 2'-O- methyl
  modified_base 18: mod_base = OTHER; note = 2'-O- methyl
  modified_base 19: mod_base = OTHER; note = 2'-O- methyl
  modified_base 20: mod_base = OTHER; note = 2'-O- methyl
ccaccttttcttctaatgaa

SEQ ID NO: 425 - RNA, 20 nt, synthetic construct
  source 1..20: mol_type = other RNA
  modified_base 1: mod_base = OTHER; note = 2'-O- methyl, 3'- thiophosphate
  modified_base 2: mod_base = OTHER; note = 2'-O- methyl, 3'- thiophosphate
  modified_base 3: mod_base = OTHER; note = 2'-O- methyl
  modified_base 4: mod_base = OTHER; note = 2'-O- methyl
  modified_base 5: mod_base = OTHER; note = 2'-O- methyl
  modified_base 6: mod_base = OTHER; note = 2'- fluoro
  modified_base 7: mod_base = OTHER; note = 2'-O- methyl
  modified_base 8: mod_base = OTHER; note = 2'- fluoro
  modified_base 9: mod_base = OTHER; note = 2'- fluoro
  modified_base 10: mod_base = OTHER; note = 2'- fluoro
  modified_base 11: mod_base = OTHER; note = 2'-O- methyl
  modified_base 12: mod_base = OTHER; note = 2'-O- methyl
  modified_base 13: mod_base = OTHER; note = 2'-O- methyl
  modified_base 14: mod_base = OTHER; note = 2'-O- methyl
  modified_base 15: mod_base = OTHER; note = 2'-O- methyl
  modified_base 16: mod_base = OTHER; note = 2'-O- methyl
  modified_base 17: mod_base = OTHER; note = 2'-O- methyl
  modified_base 18: mod_base = OTHER; note = 2'-O- methyl
  modified_base 19: mod_base = OTHER; note = 2'-O- methyl
  modified_base 20: mod_base = OTHER; note = 2'-O- methyl
ccaccttttcttctaatgaa

SEQ ID NO: 426 - RNA, 20 nt, synthetic construct
  source 1..20: mol_type = other RNA
  modified_base 1: mod_base = OTHER; note = 2'-O- methyl, 3'- thiophosphate
  modified_base 2: mod_base = OTHER; note = 2'-O- methyl, 3'- thiophosphate
  modified_base 3: mod_base = OTHER; note = 2'-O- methyl
  modified_base 4: mod_base = OTHER; note = 2'-O- methyl
  modified_base 5: mod_base = OTHER; note = 2'-O- methyl
  modified_base 6: mod_base = OTHER; note = 2'- fluoro
  modified_base 7: mod_base = OTHER; note = 2'-O- methyl
  modified_base 8: mod_base = OTHER; note = 2'- fluoro
  modified_base 9: mod_base = OTHER; note = 2'-O- methyl
  modified_base 10: mod_base = OTHER; note = 2'- fluoro
  modified_base 11: mod_base = OTHER; note = 2'-O- methyl
  modified_base 12: mod_base = OTHER; note = 2'-O- methyl
  modified_base 13: mod_base = OTHER; note = 2'-O- methyl
  modified_base 14: mod_base = OTHER; note = 2'-O- methyl
  modified_base 15: mod_base = OTHER; note = 2'-O- methyl
  modified_base 16: mod_base = OTHER; note = 2'- fluoro
  modified_base 17: mod_base = OTHER; note = 2'-O- methyl
  modified_base 18: mod_base = OTHER; note = 2'-O- methyl
  modified_base 19: mod_base = OTHER; note = 2'-O- methyl
  modified_base 20: mod_base = OTHER; note = 2'-O- methyl
accttttcttctaatgagta

SEQ ID NO: 427 - RNA, 20 nt, synthetic construct
  source 1..20: mol_type = other RNA
  modified_base 1: mod_base = OTHER; note = 2'-O- methyl, 3'- thiophosphate
  modified_base 2: mod_base = OTHER; note = 2'-O- methyl, 3'- thiophosphate
  modified_base 3: mod_base = OTHER; note = 2'-O- methyl
  modified_base 4: mod_base = OTHER; note = 2'-O- methyl
  modified_base 5: mod_base = OTHER; note = 2'-O- methyl
  modified_base 6: mod_base = OTHER; note = 2'- fluoro
  modified_base 7: mod_base = OTHER; note = 2'-O- methyl
  modified_base 8: mod_base = OTHER; note = 2'- fluoro
  modified_base 9: mod_base = OTHER; note = 2'- fluoro
  modified_base 10: mod_base = OTHER; note = 2'- fluoro
  modified_base 11: mod_base = OTHER; note = 2'-O- methyl
  modified_base 12: mod_base = OTHER; note = 2'-O- methyl
  modified_base 13: mod_base = OTHER; note = 2'-O- methyl
  modified_base 14: mod_base = OTHER; note = 2'-O- methyl
  modified_base 15: mod_base = OTHER; note = 2'-O- methyl
  modified_base 16: mod_base = OTHER; note = 2'- fluoro
  modified_base 17: mod_base = OTHER; note = 2'-O- methyl
  modified_base 18: mod_base = OTHER; note = 2'-O- methyl
  modified_base 19: mod_base = OTHER; note = 2'-O- methyl
  modified_base 20: mod_base = OTHER; note = 2'-O- methyl
accttttcttctaatgagta

SEQ ID NO: 428 - RNA, 20 nt, synthetic construct
  source 1..20: mol_type = other RNA
  modified_base 1: mod_base = OTHER; note = 2'-O- methyl, 3'- thiophosphate
  modified_base 2: mod_base = OTHER; note = 2'-O- methyl, 3'- thiophosphate
  modified_base 3: mod_base = OTHER; note = 2'-O- methyl
  modified_base 4: mod_base = OTHER; note = 2'-O- methyl
  modified_base 5: mod_base = OTHER; note = 2'-O- methyl
  modified_base 6: mod_base = OTHER; note = 2'- fluoro
  modified_base 7: mod_base = OTHER; note = 2'-O- methyl
  modified_base 8: mod_base = OTHER; note = 2'- fluoro
  modified_base 9: mod_base = OTHER; note = 2'- fluoro
  modified_base 10: mod_base = OTHER; note = 2'- fluoro
  modified_base 11: mod_base = OTHER; note = 2'-O- methyl
  modified_base 12: mod_base = OTHER; note = 2'-O- methyl
  modified_base 13: mod_base = OTHER; note = 2'-O- methyl
  modified_base 14: mod_base = OTHER; note = 2'-O- methyl
  modified_base 15: mod_base = OTHER; note = 2'-O- methyl
  modified_base 16: mod_base = OTHER; note = 2'-O- methyl
  modified_base 17: mod_base = OTHER; note = 2'-O- methyl
  modified_base 18: mod_base = OTHER; note = 2'-O- methyl
  modified_base 19: mod_base = OTHER; note = 2'-O- methyl
  modified_base 20: mod_base = OTHER; note = 2'-O- methyl
accttttcttctaatgagta

SEQ ID NO: 429 - RNA, 21 nt, synthetic construct
  source 1..21: mol_type = other RNA
  modified_base 1: mod_base = OTHER; note = 2'-O- methyl, 3'- thiophosphate
  modified_base 2: mod_base = OTHER; note = 2'-O- methyl, 3'- thiophosphate
  modified_base 3: mod_base = OTHER; note = 2'-O- methyl
  modified_base 4: mod_base = OTHER; note = 2'-O- methyl
  modified_base 5: mod_base = OTHER; note = 2'-O- methyl
  modified_base 6: mod_base = OTHER; note = 2'-O- methyl
  modified_base 7: mod_base = OTHER; note = 2'- fluoro
  modified_base 8: mod_base = OTHER; note = 2'-O- methyl
  modified_base 9: mod_base = OTHER; note = 2'- fluoro
  modified_base 10: mod_base = OTHER; note = 2'-O- methyl
  modified_base 11: mod_base = OTHER; note = 2'- fluoro
  modified_base 12: mod_base = OTHER; note = 2'-O- methyl
  modified_base 13: mod_base = OTHER; note = 2'-O- methyl
  modified_base 14: mod_base = OTHER; note = 2'-O- methyl
  modified_base 15: mod_base = OTHER; note = 2'-O- methyl
  modified_base 16: mod_base = OTHER; note = 2'-O- methyl
  modified_base 17: mod_base = OTHER; note = 2'- fluoro
  modified_base 18: mod_base = OTHER; note = 2'-O- methyl
  modified_base 19: mod_base = OTHER; note = 2'-O- methyl
  modified_base 20: mod_base = OTHER; note = 2'-O- methyl
  modified_base 21: mod_base = OTHER; note = 2'-O- methyl
ggttttaaaattaaagtataa

SEQ ID NO: 430 - RNA, 21 nt, synthetic construct
  source 1..21: mol_type = other RNA
  modified_base 1: mod_base = OTHER; note = 2'-O- methyl, 3'- thiophosphate
  modified_base 2: mod_base = OTHER; note = 2'-O- methyl, 3'- thiophosphate
  modified_base 3: mod_base = OTHER; note = 2'-O- methyl
  modified_base 4: mod_base = OTHER; note = 2'-O- methyl
  modified_base 5: mod_base = OTHER; note = 2'-O- methyl
  modified_base 6: mod_base = OTHER; note = 2'-O- methyl
  modified_base 7: mod_base = OTHER; note = 2'- fluoro
  modified_base 8: mod_base = OTHER; note = 2'-O- methyl
  modified_base 9: mod_base = OTHER; note = 2'- fluoro
  modified_base 10: mod_base = OTHER; note = 2'- fluoro
  modified_base 11: mod_base = OTHER; note = 2'- fluoro
  modified_base 12: mod_base = OTHER; note = 2'-O- methyl
  modified_base 13: mod_base = OTHER; note = 2'-O- methyl
  modified_base 14: mod_base = OTHER; note = 2'-O- methyl
  modified_base 15: mod_base = OTHER; note = 2'-O- methyl
  modified_base 16: mod_base = OTHER; note = 2'-O- methyl
  modified_base 17: mod_base = OTHER; note = 2'- fluoro
  modified_base 18: mod_base = OTHER; note = 2'-O- methyl
  modified_base 19: mod_base = OTHER; note = 2'-O- methyl
  modified_base 20: mod_base = OTHER; note = 2'-O- methyl
  modified_base 21: mod_base = OTHER; note = 2'-O- methyl
ggttttaaaattaaagtataa

SEQ ID NO: 431 - RNA, 21 nt, synthetic construct
  source 1..21: mol_type = other RNA
  modified_base 1: mod_base = OTHER; note = 2'-O- methyl, 3'- thiophosphate
  modified_base 2: mod_base = OTHER; note = 2'-O- methyl, 3'- thiophosphate
  modified_base 3: mod_base = OTHER; note = 2'-O- methyl
  modified_base 4: mod_base = OTHER; note = 2'-O- methyl
  modified_base 5: mod_base = OTHER; note = 2'-O- methyl
  modified_base 6: mod_base = OTHER; note = 2'-O- methyl
  modified_base 7: mod_base = OTHER; note = 2'- fluoro
  modified_base 8: mod_base = OTHER; note = 2'-O- methyl
  modified_base 9: mod_base = OTHER; note = 2'- fluoro
  modified_base 10: mod_base = OTHER; note = 2'- fluoro
  modified_base 11: mod_base = OTHER; note = 2'- fluoro
  modified_base 12: mod_base = OTHER; note = 2'-O- methyl
  modified_base 13: mod_base = OTHER; note = 2'-O- methyl
  modified_base 14: mod_base = OTHER; note = 2'-O- methyl
  modified_base 15: mod_base = OTHER; note = 2'-O- methyl
  modified_base 16: mod_base = OTHER; note = 2'-O- methyl
  modified_base 17: mod_base = OTHER; note = 2'-O- methyl
  modified_base 18: mod_base = OTHER; note = 2'-O- methyl
  modified_base 19: mod_base = OTHER; note = 2'-O- methyl
  modified_base 20: mod_base = OTHER; note = 2'-O- methyl
  modified_base 21: mod_base = OTHER; note = 2'-O- methyl
ggttttaaaattaaagtataa

SEQ ID NO: 432 - RNA, 23 nt, synthetic construct
  source 1..23: mol_type = other RNA
  modified_base 1: mod_base = OTHER; note = 2'-O- methyl, 3'- thiophosphate, 5'-Ethenyl-(E)-phosphonate
  modified_base 2: mod_base = OTHER; note = 2'- fluoro, 3'- thiophosphate
  modified_base 3: mod_base = OTHER; note = 2'-O- methyl
  modified_base 4: mod_base = OTHER; note = 2'- fluoro
  modified_base 5: mod_base = OTHER; note = 2'- fluoro
  modified_base 6: mod_base = OTHER; note = 2'- fluoro
  modified_base 7: mod_base = OTHER; note = 2'-O- methyl
  modified_base 8: mod_base = OTHER; note = 2'-O- methyl
  modified_base 9: mod_base = OTHER; note = 2'-O- methyl
  modified_base 10: mod_base = OTHER; note = 2'-O- methyl
  modified_base 11: mod_base = OTHER; note = 2'-O- methyl
  modified_base 12: mod_base = OTHER; note = 2'-O- methyl
  modified_base 13: mod_base = OTHER; note = 2'-O- methyl
  modified_base 14: mod_base = OTHER; note = 2'- fluoro
  modified_base 15: mod_base = OTHER; note = 2'-O- methyl
  modified_base 16: mod_base = OTHER; note = 2'- fluoro
  modified_base 17: mod_base = OTHER; note = 2'-O- methyl
  modified_base 18: mod_base = OTHER; note = 2'-O- methyl
  modified_base 19: mod_base = OTHER; note = 2'-O- methyl
  modified_base 20: mod_base = OTHER; note = 2'-O- methyl
  modified_base 21: mod_base = OTHER; note = 2'-O- methyl, 3'- thiophosphate
  modified_base 22: mod_base = OTHER; note = 2'-O- methyl, 3'- thiophosphate
  modified_base 23: mod_base = OTHER; note = 2'-O- methyl
tactttaattttaaaacccaatt

SEQ ID NO: 433 - RNA, 23 nt, synthetic construct
  source 1..23: mol_type = other RNA
  modified_base 1: mod_base = OTHER; note = 2'-O- methyl, 3'- thiophosphate, 5'-Ethenyl-(E)-phosphonate
  modified_base 2: mod_base = OTHER; note = 2'- fluoro, 3'- thiophosphate
  modified_base 3: mod_base = OTHER; note = 2'- fluoro
  modified_base 4: mod_base = OTHER; note = 2'- fluoro
  modified_base 5: mod_base = OTHER; note = 2'-O- methyl
  modified_base 6: mod_base = OTHER; note = 2'- fluoro
  modified_base 7: mod_base = OTHER; note = 2'-O- methyl
  modified_base 8: mod_base = OTHER; note = 2'-O- methyl
  modified_base 9: mod_base = OTHER; note = 2'-O- methyl
  modified_base 10: mod_base = OTHER; note = 2'-O- methyl
  modified_base 11: mod_base = OTHER; note = 2'-O- methyl
  modified_base 12: mod_base = OTHER; note = 2'-O- methyl
  modified_base 13: mod_base = OTHER; note = 2'-O- methyl
  modified_base 14: mod_base = OTHER; note = 2'- fluoro
  modified_base 15: mod_base = OTHER; note = 2'-O- methyl
  modified_base 16: mod_base = OTHER; note = 2'- fluoro
  modified_base 17: mod_base = OTHER; note = 2'-O- methyl
  modified_base 18: mod_base = OTHER; note = 2'-O- methyl
  modified_base 19: mod_base = OTHER; note = 2'-O- methyl
  modified_base 20: mod_base = OTHER; note = 2'-O- methyl
  modified_base 21: mod_base = OTHER; note = 2'-O- methyl, 3'- thiophosphate
  modified_base 22: mod_base = OTHER; note = 2'-O- methyl, 3'- thiophosphate
  modified_base 23: mod_base = OTHER; note = 2'-O- methyl
tactttaattttaaaacccaatt

SEQ ID NO: 434 - RNA, 23 nt, synthetic construct
  source 1..23: mol_type = other RNA
  modified_base 1: mod_base = OTHER; note = 2'-O- methyl, 3'- thiophosphate, 5'-Ethenyl-(E)-phosphonate
  modified_base 2: mod_base = OTHER; note = 2'- fluoro, 3'- thiophosphate
  modified_base 3: mod_base = OTHER; note = 2'-O- methyl
  modified_base 4: mod_base = OTHER; note = 2'-O- methyl
  modified_base 5: mod_base = OTHER; note = 2'- fluoro
  modified_base 6: mod_base = OTHER; note = 2'- fluoro
  modified_base 7: mod_base = OTHER; note = 2'-O- methyl
  modified_base 8: mod_base = OTHER; note = 2'-O- methyl
  modified_base 9: mod_base = OTHER; note = 2'-O- methyl
  modified_base 10: mod_base = OTHER; note = 2'-O- methyl
  modified_base 11: mod_base = OTHER; note = 2'-O- methyl
  modified_base 12: mod_base = OTHER; note = 2'-O- methyl
  modified_base 13: mod_base = OTHER; note = 2'-O- methyl
  modified_base 14: mod_base = OTHER; note = 2'- fluoro
  modified_base 15: mod_base = OTHER; note = 2'-O- methyl
  modified_base 16: mod_base = OTHER; note = 2'- fluoro
  modified_base 17: mod_base = OTHER; note = 2'-O- methyl
  modified_base 18: mod_base = OTHER; note = 2'-O- methyl
  modified_base 19: mod_base = OTHER; note = 2'-O- methyl
  modified_base 20: mod_base = OTHER; note = 2'-O- methyl
  modified_base 21: mod_base = OTHER; note = 2'-O- methyl, 3'- thiophosphate
  modified_base 22: mod_base = OTHER; note = 2'-O- methyl, 3'- thiophosphate
  modified_base 23: mod_base = OTHER; note = 2'-O- methyl
tactttaattttaaaacccaatt

SEQ ID NO: 435 - RNA, 23 nt, synthetic construct
  source 1..23: mol_type = other RNA
  modified_base 1: mod_base = OTHER; note = 2'-O- methyl, 3'- thiophosphate, 5'-Ethenyl-(E)-phosphonate
  modified_base 2: mod_base = OTHER; note = 2'- fluoro, 3'- thiophosphate
  modified_base 3: mod_base = OTHER; note = 2'- fluoro
  modified_base 4: mod_base = OTHER; note = 2'-O- methyl
  modified_base 5: mod_base = OTHER; note = 2'-O- methyl
  modified_base 6: mod_base = OTHER; note = 2'- fluoro
  modified_base 7: mod_base = OTHER; note = 2'-O- methyl
  modified_base 8: mod_base = OTHER; note = 2'-O- methyl
  modified_base 9: mod_base = OTHER; note = 2'-O- methyl
  modified_base 10: mod_base = OTHER; note = 2'-O- methyl
  modified_base 11: mod_base = OTHER; note = 2'-O- methyl
  modified_base 12: mod_base = OTHER; note = 2'-O- methyl
  modified_base 13: mod_base = OTHER; note = 2'-O- methyl
  modified_base 14: mod_base = OTHER; note = 2'- fluoro
  modified_base 15: mod_base = OTHER; note = 2'-O- methyl
  modified_base 16: mod_base = OTHER; note = 2'- fluoro
  modified_base 17: mod_base = OTHER; note = 2'-O- methyl
  modified_base 18: mod_base = OTHER; note = 2'-O- methyl
  modified_base 19: mod_base = OTHER; note = 2'-O- methyl
  modified_base 20: mod_base = OTHER; note = 2'-O- methyl
  modified_base 21: mod_base = OTHER; note = 2'-O- methyl, 3'- thiophosphate
  modified_base 22: mod_base = OTHER; note = 2'-O- methyl, 3'- thiophosphate
  modified_base 23: mod_base = OTHER; note = 2'-O- methyl
tactttaattttaaaacccaatt

SEQ ID NO: 436 - RNA, 23 nt, synthetic construct
  source 1..23: mol_type = other RNA
  modified_base 1: mod_base = OTHER; note = 2'-O- methyl, 3'- thiophosphate, 5'-Ethenyl-(E)-phosphonate
  modified_base 2: mod_base = OTHER; note = 2'- fluoro, 3'- thiophosphate
  modified_base 3: mod_base = OTHER; note = 2'-O- methyl
  modified_base 4: mod_base = OTHER; note = 2'-O- methyl
  modified_base 5: mod_base = OTHER; note = 2'-O- methyl
  modified_base 6: mod_base = OTHER; note = 2'- fluoro
  modified_base 7: mod_base = OTHER; note = 2'-O- methyl
  modified_base 8: mod_base = OTHER; note = 2'-O- methyl
  modified_base 9: mod_base = OTHER; note = 2'-O- methyl
  modified_base 10: mod_base = OTHER; note = 2'-O- methyl
  modified_base 11: mod_base = OTHER; note = 2'-O- methyl
  modified_base 12: mod_base = OTHER; note = 2'-O- methyl
  modified_base 13: mod_base = OTHER; note = 2'-O- methyl
  modified_base 14: mod_base = OTHER; note = 2'- fluoro
  modified_base 15: mod_base = OTHER; note = 2'-O- methyl
  modified_base 16: mod_base = OTHER; note = 2'- fluoro
  modified_base 17: mod_base = OTHER; note = 2'-O- methyl
  modified_base 18: mod_base = OTHER; note = 2'-O- methyl
  modified_base 19: mod_base = OTHER; note = 2'-O- methyl
  modified_base 20: mod_base = OTHER; note = 2'-O- methyl
  modified_base 21: mod_base = OTHER; note = 2'-O- methyl, 3'- thiophosphate
  modified_base 22: mod_base = OTHER; note = 2'-O- methyl, 3'- thiophosphate
  modified_base 23: mod_base = OTHER; note = 2'-O- methyl
tactttaattttaaaacccaatt

SEQ ID NO: 437 - RNA, 23 nt, synthetic construct
  source 1..23: mol_type = other RNA
  modified_base 1: mod_base = OTHER; note = 2'-O- methyl, 3'- thiophosphate, 5'-Ethenyl-(E)-phosphonate
  modified_base 2: mod_base = OTHER; note = 2'- fluoro, 3'- thiophosphate
  modified_base 3: mod_base = OTHER; note = 2'- fluoro
  modified_base 4: mod_base = OTHER; note = 2'-O- methyl
  modified_base 5: mod_base = OTHER; note = 2'- fluoro
  modified_base 6: mod_base = OTHER; note = 2'- fluoro
  modified_base 7: mod_base = OTHER; note = 2'-O- methyl
  modified_base 8: mod_base = OTHER; note = 2'-O- methyl
  modified_base 9: mod_base = OTHER; note = 2'-O- methyl
  modified_base 10: mod_base = OTHER; note = 2'-O- methyl
  modified_base 11: mod_base = OTHER; note = 2'-O- methyl
  modified_base 12: mod_base = OTHER; note = 2'-O- methyl
  modified_base 13: mod_base = OTHER; note = 2'-O- methyl
  modified_base 14: mod_base = OTHER; note = 2'- fluoro
  modified_base 15: mod_base = OTHER; note = 2'-O- methyl
  modified_base 16: mod_base = OTHER; note = 2'- fluoro
  modified_base 17: mod_base = OTHER; note = 2'-O- methyl
  modified_base 18: mod_base = OTHER; note = 2'-O- methyl
  modified_base 19: mod_base = OTHER; note = 2'-O- methyl
  modified_base 20: mod_base = OTHER; note = 2'-O- methyl
  modified_base 21: mod_base = OTHER; note = 2'-O- methyl, 3'- thiophosphate
  modified_base 22: mod_base = OTHER; note = 2'-O- methyl, 3'- thiophosphate
  modified_base 23: mod_base = OTHER; note = 2'-O- methyl
tactttaattttaaaacccaatt

SEQ ID NO: 438 - RNA, 23 nt, synthetic construct
  source 1..23: mol_type = other RNA
  modified_base 1: mod_base = OTHER; note = 2'-O- methyl, 3'- thiophosphate
  modified_base 2: mod_base = OTHER; note = 2'- fluoro, 3'- thiophosphate
  modified_base 3: mod_base = OTHER; note = 2'-O- methyl
  modified_base 4: mod_base = OTHER; note = 2'-O- methyl
  modified_base 5: mod_base = OTHER; note = 2'-O- methyl
  modified_base 6: mod_base = OTHER; note = 2'- fluoro
  modified_base 7: mod_base = OTHER; note = 2'-O- methyl
  modified_base 8: mod_base = OTHER; note = 2'-O- methyl
  modified_base 9: mod_base = OTHER; note = 2'-O- methyl
  modified_base 10: mod_base = OTHER; note = 2'-O- methyl
  modified_base 11: mod_base = OTHER; note = 2'-O- methyl
  modified_base 12: mod_base = OTHER; note = 2'-O- methyl
  modified_base 13: mod_base = OTHER; note = 2'-O- methyl
  modified_base 14: mod_base = OTHER; note = 2'- fluoro
  modified_base 15: mod_base = OTHER; note = 2'-O- methyl
  modified_base 16: mod_base = OTHER; note = 2'- fluoro
  modified_base 17: mod_base = OTHER; note = 2'-O- methyl
  modified_base 18: mod_base = OTHER; note = 2'-O- methyl
  modified_base 19: mod_base = OTHER; note = 2'-O- methyl
  modified_base 20: mod_base = OTHER; note = 2'-O- methyl
  modified_base 21: mod_base = OTHER; note = 2'-O- methyl, 3'- thiophosphate
  modified_base 22: mod_base = OTHER; note = 2'-O- methyl, 3'- thiophosphate
  modified_base 23: mod_base = OTHER; note = 2'-O- methyl
tactttaattttaaaacccaatt

SEQ ID NO: 439 - RNA, 23 nt, synthetic construct
  source 1..23: mol_type = other RNA
  modified_base 1: mod_base = OTHER; note = 2'-O- methyl, 3'- thiophosphate, 5'-Ethenyl-(E)-phosphonate
  modified_base 2: mod_base = OTHER; note = 2'- fluoro, 3'- thiophosphate
  modified_base 3: mod_base = OTHER; note = 2'-O- methyl
  modified_base 4: mod_base = OTHER; note = 2'- fluoro
  modified_base 5: mod_base = OTHER; note = 2'- fluoro
  modified_base 6: mod_base = OTHER; note = 2'- fluoro
  modified_base 7: mod_base = OTHER; note = 2'-O- methyl
  modified_base 8: mod_base = OTHER; note = 2'-O- methyl
  modified_base 9: mod_base = OTHER; note = 2'-O- methyl
  modified_base 10: mod_base = OTHER; note = 2'-O- methyl
  modified_base 11: mod_base = OTHER; note = 2'-O- methyl
  modified_base 12: mod_base = OTHER; note = 2'-O- methyl
  modified_base 13: mod_base = OTHER; note = 2'-O- methyl
  modified_base 14: mod_base = OTHER; note = 2'- fluoro
  modified_base 15: mod_base = OTHER; note = 2'-O- methyl
  modified_base 16: mod_base = OTHER; note = 2'- fluoro
  modified_base 17: mod_base = OTHER; note = 2'-O- methyl
  modified_base 18: mod_base = OTHER; note = 2'-O- methyl
  modified_base 19: mod_base = OTHER; note = 2'-O- methyl
  modified_base 20: mod_base = OTHER; note = 2'-O- methyl
  modified_base 21: mod_base = OTHER; note = 2'-O- methyl, 3'- thiophosphate
  modified_base 22: mod_base = OTHER; note = 2'-O- methyl, 3'- thiophosphate
  modified_base 23: mod_base = OTHER; note = 2'-O- methyl
aatttttgttctcaacttgaaaa

SEQ ID NO: 440 - RNA, 23 nt, synthetic construct
  source 1..23: mol_type = other RNA
  modified_base 1: mod_base = OTHER; note = 2'-O- methyl, 3'- thiophosphate, 5'-Ethenyl-(E)-phosphonate
  modified_base 2: mod_base = OTHER; note = 2'- fluoro, 3'- thiophosphate
  modified_base 3: mod_base = OTHER; note = 2'- fluoro
  modified_base 4: mod_base = OTHER; note = 2'- fluoro
  modified_base 5: mod_base = OTHER; note = 2'-O- methyl
  modified_base 6: mod_base = OTHER; note = 2'- fluoro
  modified_base 7: mod_base = OTHER; note = 2'-O- methyl
  modified_base 8: mod_base = OTHER; note = 2'-O- methyl
  modified_base 9: mod_base = OTHER; note = 2'-O- methyl
  modified_base 10: mod_base = OTHER; note = 2'-O- methyl
  modified_base 11: mod_base = OTHER; note = 2'-O- methyl
  modified_base 12: mod_base = OTHER; note = 2'-O- methyl
  modified_base 13: mod_base = OTHER; note = 2'-O- methyl
  modified_base 14: mod_base = OTHER; note = 2'- fluoro
  modified_base 15: mod_base = OTHER; note = 2'-O- methyl
  modified_base 16: mod_base = OTHER; note = 2'- fluoro
  modified_base 17: mod_base = OTHER; note = 2'-O- methyl
  modified_base 18: mod_base = OTHER; note = 2'-O- methyl
  modified_base 19: mod_base = OTHER; note = 2'-O- methyl
  modified_base 20: mod_base = OTHER; note = 2'-O- methyl
  modified_base 21: mod_base = OTHER; note = 2'-O- methyl, 3'- thiophosphate
  modified_base 22: mod_base = OTHER; note = 2'-O- methyl, 3'- thiophosphate
  modified_base 23: mod_base = OTHER; note = 2'-O- methyl
aatttttgttctcaacttgaaaa

SEQ ID NO: 441 - RNA, 23 nt, synthetic construct
  source 1..23: mol_type = other RNA
  modified_base 1: mod_base = OTHER; note = 2'-O- methyl, 3'- thiophosphate, 5'-Ethenyl-(E)-phosphonate
  modified_base 2: mod_base = OTHER; note = 2'- fluoro, 3'- thiophosphate
  modified_base 3: mod_base = OTHER; note = 2'-O- methyl
  modified_base 4: mod_base = OTHER; note = 2'-O- methyl
  modified_base 5: mod_base = OTHER; note = 2'- fluoro
  modified_base 6: mod_base = OTHER; note = 2'- fluoro
  modified_base 7: mod_base = OTHER; note = 2'-O- methyl
  modified_base 8: mod_base = OTHER; note = 2'-O- methyl
  modified_base 9: mod_base = OTHER; note = 2'-O- methyl
  modified_base 10: mod_base = OTHER; note = 2'-O- methyl
  modified_base 11: mod_base = OTHER; note = 2'-O- methyl
  modified_base 12: mod_base = OTHER; note = 2'-O- methyl
  modified_base 13: mod_base = OTHER; note = 2'-O- methyl
  modified_base 14: mod_base = OTHER; note = 2'- fluoro
  modified_base 15: mod_base = OTHER; note = 2'-O- methyl
  modified_base 16: mod_base = OTHER; note = 2'- fluoro
  modified_base 17: mod_base = OTHER; note = 2'-O- methyl
  modified_base 18: mod_base = OTHER; note = 2'-O- methyl
  modified_base 19: mod_base = OTHER; note = 2'-O- methyl
  modified_base 20: mod_base = OTHER; note = 2'-O- methyl
  modified_base 21: mod_base = OTHER; note = 2'-O- methyl, 3'- thiophosphate
  modified_base 22: mod_base = OTHER; note = 2'-O- methyl, 3'- thiophosphate
  modified_base 23: mod_base = OTHER; note = 2'-O- methyl
aatttttgttctcaacttgaaaa

SEQ ID NO: 442 - RNA, 23 nt, synthetic construct
  source 1..23: mol_type = other RNA
  modified_base 1: mod_base = OTHER; note = 2'-O- methyl, 3'- thiophosphate, 5'-Ethenyl-(E)-phosphonate
  modified_base 2: mod_base = OTHER; note = 2'- fluoro, 3'- thiophosphate
  modified_base 3: mod_base = OTHER; note = 2'- fluoro
  modified_base 4: mod_base = OTHER; note = 2'-O- methyl
  modified_base 5: mod_base = OTHER; note = 2'-O- methyl
  modified_base 6: mod_base = OTHER; note = 2'- fluoro
  modified_base 7: mod_base = OTHER; note = 2'-O- methyl
  modified_base 8: mod_base = OTHER; note = 2'-O- methyl
  modified_base 9: mod_base = OTHER; note = 2'-O- methyl
  modified_base 10: mod_base = OTHER; note = 2'-O- methyl
  modified_base 11: mod_base = OTHER; note = 2'-O- methyl
  modified_base 12: mod_base = OTHER; note = 2'-O- methyl
  modified_base 13: mod_base = OTHER; note = 2'-O- methyl
  modified_base 14: mod_base = OTHER; note = 2'- fluoro
  modified_base 15: mod_base = OTHER; note = 2'-O- methyl
  modified_base 16: mod_base = OTHER; note = 2'- fluoro
  modified_base 17: mod_base = OTHER; note = 2'-O- methyl
  modified_base 18: mod_base = OTHER; note = 2'-O- methyl
  modified_base 19: mod_base = OTHER; note = 2'-O- methyl
  modified_base 20: mod_base = OTHER; note = 2'-O- methyl
  modified_base 21: mod_base = OTHER; note = 2'-O- methyl, 3'- thiophosphate
  modified_base 22: mod_base = OTHER; note = 2'-O- methyl, 3'- thiophosphate
  modified_base 23: mod_base = OTHER; note = 2'-O- methyl
aatttttgttctcaacttgaaaa

SEQ ID NO: 443 - RNA, 23 nt, synthetic construct
  source 1..23: mol_type = other RNA
  modified_base 1: mod_base = OTHER; note = 2'-O- methyl, 3'- thiophosphate, 5'-Ethenyl-(E)-phosphonate
  modified_base 2: mod_base = OTHER; note = 2'- fluoro, 3'- thiophosphate
  modified_base 3: mod_base = OTHER; note = 2'-O- methyl
  modified_base 4: mod_base = OTHER; note = 2'-O- methyl
  modified_base 5: mod_base = OTHER; note = 2'-O- methyl
  modified_base 6: mod_base = OTHER; note = 2'- fluoro
  modified_base 7: mod_base = OTHER; note = 2'-O- methyl
  modified_base 8: mod_base = OTHER; note = 2'-O- methyl
  modified_base 9: mod_base = OTHER; note = 2'-O- methyl
  modified_base 10: mod_base = OTHER; note = 2'-O- methyl
  modified_base 11: mod_base = OTHER; note = 2'-O- methyl
  modified_base 12: mod_base = OTHER; note = 2'-O- methyl
  modified_base 13: mod_base = OTHER; note = 2'-O- methyl
  modified_base 14: mod_base = OTHER; note = 2'- fluoro
  modified_base 15: mod_base = OTHER; note = 2'-O- methyl
  modified_base 16: mod_base = OTHER; note = 2'- fluoro
  modified_base 17: mod_base = OTHER; note = 2'-O- methyl
  modified_base 18: mod_base = OTHER; note = 2'-O- methyl
  modified_base 19: mod_base = OTHER; note = 2'-O- methyl
  modified_base 20: mod_base = OTHER; note = 2'-O- methyl
  modified_base 21: mod_base = OTHER; note = 2'-O- methyl, 3'- thiophosphate
  modified_base 22: mod_base = OTHER; note = 2'-O- methyl, 3'- thiophosphate
  modified_base 23: mod_base = OTHER; note = 2'-O- methyl
aatttttgttctcaacttgaaaa

SEQ ID NO: 444 - RNA, 23 nt, synthetic construct
  source 1..23: mol_type = other RNA
  modified_base 1: mod_base = OTHER; note = 2'-O- methyl, 3'- thiophosphate, 5'-Ethenyl-(E)-phosphonate
  modified_base 2: mod_base = OTHER; note = 2'- fluoro, 3'- thiophosphate
  modified_base 3: mod_base = OTHER; note = 2'- fluoro
  modified_base 4: mod_base = OTHER; note = 2'-O- methyl
  modified_base 5: mod_base = OTHER; note = 2'- fluoro
  modified_base 6: mod_base = OTHER; note = 2'- fluoro
  modified_base 7: mod_base = OTHER; note = 2'-O- methyl
  modified_base 8: mod_base = OTHER; note = 2'-O- methyl
  modified_base 9: mod_base = OTHER; note = 2'-O- methyl
  modified_base 10: mod_base = OTHER; note = 2'-O- methyl
  modified_base 11: mod_base = OTHER; note = 2'-O- methyl
  modified_base 12: mod_base = OTHER; note = 2'-O- methyl
  modified_base 13: mod_base = OTHER; note = 2'-O- methyl
  modified_base 14: mod_base = OTHER; note = 2'- fluoro
  modified_base 15: mod_base = OTHER; note = 2'-O- methyl
  modified_base 16: mod_base = OTHER; note = 2'- fluoro
  modified_base 17: mod_base = OTHER; note = 2'-O- methyl
  modified_base 18: mod_base = OTHER; note = 2'-O- methyl
  modified_base 19: mod_base = OTHER; note = 2'-O- methyl
  modified_base 20: mod_base = OTHER; note = 2'-O- methyl
  modified_base 21: mod_base = OTHER; note = 2'-O- methyl, 3'- thiophosphate
  modified_base 22: mod_base = OTHER; note = 2'-O- methyl, 3'- thiophosphate
  modified_base 23: mod_base = OTHER; note = 2'-O- methyl
aatttttgttctcaacttgaaaa

SEQ ID NO: 445 - RNA, 23 nt, synthetic construct
  source 1..23: mol_type = other RNA
  modified_base 1: mod_base = OTHER; note = 2'-O- methyl, 3'- thiophosphate
  modified_base 2: mod_base = OTHER; note = 2'- fluoro, 3'- thiophosphate
  modified_base 3: mod_base = OTHER; note = 2'-O- methyl
  modified_base 4: mod_base = OTHER; note = 2'-O- methyl
  modified_base 5: mod_base = OTHER; note = 2'-O- methyl
  modified_base 6: mod_base = OTHER; note = 2'- fluoro
  modified_base 7: mod_base = OTHER; note = 2'-O- methyl
  modified_base 8: mod_base = OTHER; note = 2'-O- methyl
  modified_base 9: mod_base = OTHER; note = 2'-O- methyl
  modified_base 10: mod_base = OTHER; note = 2'-O- methyl
  modified_base 11: mod_base = OTHER; note = 2'-O- methyl
  modified_base 12: mod_base = OTHER; note = 2'-O- methyl
  modified_base 13: mod_base = OTHER; note = 2'-O- methyl
  modified_base 14: mod_base = OTHER; note = 2'- fluoro
  modified_base 15: mod_base = OTHER; note = 2'-O- methyl
  modified_base 16: mod_base = OTHER; note = 2'- fluoro
  modified_base 17: mod_base = OTHER; note = 2'-O- methyl
  modified_base 18: mod_base = OTHER; note = 2'-O- methyl
  modified_base 19: mod_base = OTHER; note = 2'-O- methyl
  modified_base 20: mod_base = OTHER; note = 2'-O- methyl
  modified_base 21: mod_base = OTHER; note = 2'-O- methyl, 3'- thiophosphate
  modified_base 22: mod_base = OTHER; note = 2'-O- methyl, 3'- thiophosphate
  modified_base 23: mod_base = OTHER; note = 2'-O- methyl
aatttttgttctcaacttgaaaa

SEQ ID NO: 446 - RNA, 23 nt, synthetic construct
  source 1..23: mol_type = other RNA
  modified_base 1: mod_base = OTHER; note = 2'-O- methyl, 3'- thiophosphate, 5'-Ethenyl-(E)-phosphonate
  modified_base 2: mod_base = OTHER; note = 2'- fluoro, 3'- thiophosphate
  modified_base 3: mod_base = OTHER; note = 2'-O- methyl
  modified_base 4: mod_base = OTHER; note = 2'- fluoro
  modified_base 5: mod_base = OTHER; note = 2'- fluoro
  modified_base 6: mod_base = OTHER; note = 2'- fluoro
  modified_base 7: mod_base = OTHER; note = 2'-O- methyl
  modified_base 8: mod_base = OTHER; note = 2'-O- methyl
  modified_base 9: mod_base = OTHER; note = 2'-O- methyl
  modified_base 10: mod_base = OTHER; note = 2'-O- methyl
  modified_base 11: mod_base = OTHER; note = 2'-O- methyl
  modified_base 12: mod_base = OTHER; note = 2'-O- methyl
  modified_base 13: mod_base = OTHER; note = 2'-O- methyl
  modified_base 14: mod_base = OTHER; note = 2'- fluoro
  modified_base 15: mod_base = OTHER; note = 2'-O- methyl
  modified_base 16: mod_base = OTHER; note = 2'- fluoro
  modified_base 17: mod_base = OTHER; note = 2'-O- methyl
  modified_base 18: mod_base = OTHER; note = 2'-O- methyl
  modified_base 19: mod_base = OTHER; note = 2'-O- methyl
  modified_base 20: mod_base = OTHER; note = 2'-O- methyl
  modified_base 21: mod_base = OTHER; note = 2'-O- methyl, 3'- thiophosphate
  modified_base 22: mod_base = OTHER; note = 2'-O- methyl, 3'- thiophosphate
  modified_base 23: mod_base = OTHER; note = 2'-O- methyl
tttgttctcaacttgaaaaggga

SEQ ID NO: 447 - RNA, 23 nt, synthetic construct
  source 1..23: mol_type = other RNA
  modified_base 1: mod_base = OTHER; note = 2'-O- methyl, 3'- thiophosphate, 5'-Ethenyl-(E)-phosphonate
  modified_base 2: mod_base = OTHER; note = 2'- fluoro, 3'- thiophosphate
  modified_base 3: mod_base = OTHER; note = 2'- fluoro
  modified_base 4: mod_base = OTHER; note = 2'- fluoro
  modified_base 5: mod_base = OTHER; note = 2'-O- methyl
  modified_base 6: mod_base = OTHER; note = 2'- fluoro
  modified_base 7: mod_base = OTHER; note = 2'-O- methyl
  modified_base 8: mod_base = OTHER; note = 2'-O- methyl
  modified_base 9: mod_base = OTHER; note = 2'-O- methyl
  modified_base 10: mod_base = OTHER; note = 2'-O- methyl
  modified_base 11: mod_base = OTHER; note = 2'-O- methyl
  modified_base 12: mod_base = OTHER; note = 2'-O- methyl
  modified_base 13: mod_base = OTHER; note = 2'-O- methyl
  modified_base 14: mod_base = OTHER; note = 2'- fluoro
  modified_base 15: mod_base = OTHER; note = 2'-O- methyl
  modified_base 16: mod_base = OTHER; note = 2'- fluoro
  modified_base 17: mod_base = OTHER; note = 2'-O- methyl
  modified_base 18: mod_base = OTHER; note = 2'-O- methyl
  modified_base 19: mod_base = OTHER; note = 2'-O- methyl
  modified_base 20: mod_base = OTHER; note = 2'-O- methyl
  modified_base 21: mod_base = OTHER; note = 2'-O- methyl, 3'- thiophosphate
  modified_base 22: mod_base = OTHER; note = 2'-O- methyl, 3'- thiophosphate
  modified_base 23: mod_base = OTHER; note = 2'-O- methyl
tttgttctcaacttgaaaaggga

SEQ ID NO: 448 - RNA, 23 nt, synthetic construct
  source 1..23: mol_type = other RNA
  modified_base 1: mod_base = OTHER; note = 2'-O- methyl, 3'- thiophosphate, 5'-Ethenyl-(E)-phosphonate
  modified_base 2: mod_base = OTHER; note = 2'- fluoro, 3'- thiophosphate
  modified_base 3: mod_base = OTHER; note = 2'-O- methyl
  modified_base 4: mod_base = OTHER; note = 2'-O- methyl
  modified_base 5: mod_base = OTHER; note = 2'- fluoro
  modified_base 6: mod_base = OTHER; note = 2'- fluoro
  modified_base 7: mod_base = OTHER; note = 2'-O- methyl
  modified_base 8: mod_base = OTHER; note = 2'-O- methyl
  modified_base 9: mod_base = OTHER; note = 2'-O- methyl
  modified_base 10: mod_base = OTHER; note = 2'-O- methyl
  modified_base 11: mod_base = OTHER; note = 2'-O- methyl
  modified_base 12: mod_base = OTHER; note = 2'-O- methyl
  modified_base 13: mod_base = OTHER; note = 2'-O- methyl
  modified_base 14: mod_base = OTHER; note = 2'- fluoro
  modified_base 15: mod_base = OTHER; note = 2'-O- methyl
  modified_base 16: mod_base = OTHER; note = 2'- fluoro
  modified_base 17: mod_base = OTHER; note = 2'-O- methyl
  modified_base 18: mod_base = OTHER; note = 2'-O- methyl
  modified_base 19: mod_base = OTHER; note = 2'-O- methyl
  modified_base 20: mod_base = OTHER; note = 2'-O- methyl
  modified_base 21: mod_base = OTHER; note = 2'-O- methyl, 3'- thiophosphate
  modified_base 22: mod_base = OTHER; note = 2'-O- methyl, 3'- thiophosphate
  modified_base 23: mod_base = OTHER; note = 2'-O- methyl
tttgttctcaacttgaaaaggga

SEQ ID NO: 449 - RNA, 23 nt, synthetic construct
  source 1..23: mol_type = other RNA
  modified_base 1: mod_base = OTHER; note = 2'-O- methyl, 3'- thiophosphate, 5'-Ethenyl-(E)-phosphonate
  modified_base 2: mod_base = OTHER; note = 2'- fluoro, 3'- thiophosphate
  modified_base 3: mod_base = OTHER; note = 2'- fluoro
  modified_base 4: mod_base = OTHER; note = 2'-O- methyl
  modified_base 5: mod_base = OTHER; note = 2'-O- methyl
  modified_base 6: mod_base = OTHER; note = 2'- fluoro
  modified_base 7: mod_base = OTHER; note = 2'-O- methyl
  modified_base 8: mod_base = OTHER; note = 2'-O- methyl
  modified_base 9: mod_base = OTHER; note = 2'-O- methyl
  modified_base 10: mod_base = OTHER; note = 2'-O- methyl
  modified_base 11: mod_base = OTHER; note = 2'-O- methyl
  modified_base 12: mod_base = OTHER; note = 2'-O- methyl
  modified_base 13: mod_base = OTHER; note = 2'-O- methyl
  modified_base 14: mod_base = OTHER; note = 2'- fluoro
  modified_base 15: mod_base = OTHER; note = 2'-O- methyl
  modified_base 16: mod_base = OTHER; note = 2'- fluoro
  modified_base 17: mod_base = OTHER; note = 2'-O- methyl
  modified_base 18: mod_base = OTHER; note = 2'-O- methyl
  modified_base 19: mod_base = OTHER; note = 2'-O- methyl
  modified_base 20: mod_base = OTHER; note = 2'-O- methyl
  modified_base 21: mod_base = OTHER; note = 2'-O- methyl, 3'- thiophosphate
  modified_base 22: mod_base = OTHER; note = 2'-O- methyl, 3'- thiophosphate
  modified_base 23: mod_base = OTHER; note = 2'-O- methyl
tttgttctcaacttgaaaaggga

SEQ ID NO: 450 - RNA, 23 nt, synthetic construct
  source 1..23: mol_type = other RNA
  modified_base 1: mod_base = OTHER; note = 2'-O- methyl, 3'- thiophosphate, 5'-Ethenyl-(E)-phosphonate
  modified_base 2: mod_base = OTHER; note = 2'- fluoro, 3'- thiophosphate
  modified_base 3: mod_base = OTHER; note = 2'-O- methyl
  modified_base 4: mod_base = OTHER; note = 2'-O- methyl
  modified_base 5: mod_base = OTHER; note = 2'-O- methyl
  modified_base 6: mod_base = OTHER; note = 2'- fluoro
  modified_base 7: mod_base = OTHER; note = 2'-O- methyl
  modified_base 8: mod_base = OTHER; note = 2'-O- methyl
  modified_base 9: mod_base = OTHER; note = 2'-O- methyl
  modified_base 10: mod_base = OTHER; note = 2'-O- methyl
  modified_base 11: mod_base = OTHER; note = 2'-O- methyl
  modified_base 12: mod_base = OTHER; note = 2'-O- methyl
  modified_base 13: mod_base = OTHER; note = 2'-O- methyl
  modified_base 14: mod_base = OTHER; note = 2'- fluoro
  modified_base 15: mod_base = OTHER; note = 2'-O- methyl
  modified_base 16: mod_base = OTHER; note = 2'- fluoro
  modified_base 17: mod_base = OTHER; note = 2'-O- methyl
  modified_base 18: mod_base = OTHER; note = 2'-O- methyl
  modified_base 19: mod_base = OTHER; note = 2'-O- methyl
  modified_base 20: mod_base = OTHER; note = 2'-O- methyl
  modified_base 21: mod_base = OTHER; note = 2'-O- methyl, 3'- thiophosphate
  modified_base 22: mod_base = OTHER; note = 2'-O- methyl, 3'- thiophosphate
  modified_base 23: mod_base = OTHER; note = 2'-O- methyl
tttgttctcaacttgaaaaggga

SEQ ID NO: 451 - RNA, 23 nt, synthetic construct
  source 1..23: mol_type = other RNA
  modified_base 1: mod_base = OTHER; note = 2'-O- methyl, 3'- thiophosphate, 5'-Ethenyl-(E)-phosphonate
  modified_base 2: mod_base = OTHER; note = 2'- fluoro, 3'- thiophosphate
  modified_base 3: mod_base = OTHER; note = 2'- fluoro
  modified_base 4: mod_base = OTHER; note = 2'-O- methyl
  modified_base 5: mod_base = OTHER; note = 2'- fluoro
  modified_base 6: mod_base = OTHER; note = 2'- fluoro
  modified_base 7: mod_base = OTHER; note = 2'-O- methyl
  modified_base 8: mod_base = OTHER; note = 2'-O- methyl
  modified_base 9: mod_base = OTHER; note = 2'-O- methyl
  modified_base 10: mod_base = OTHER; note = 2'-O- methyl
  modified_base 11: mod_base = OTHER; note = 2'-O- methyl
  modified_base 12: mod_base = OTHER; note = 2'-O- methyl
  modified_base 13: mod_base = OTHER; note = 2'-O- methyl
  modified_base 14: mod_base = OTHER; note = 2'- fluoro
  modified_base 15: mod_base = OTHER; note = 2'-O- methyl
  modified_base 16: mod_base = OTHER; note = 2'- fluoro
  modified_base 17: mod_base = OTHER; note = 2'-O- methyl
  modified_base 18: mod_base = OTHER; note = 2'-O- methyl
  modified_base 19: mod_base = OTHER; note = 2'-O- methyl
  modified_base 20: mod_base = OTHER; note = 2'-O- methyl
  modified_base 21: mod_base = OTHER; note = 2'-O- methyl, 3'- thiophosphate
  modified_base 22: mod_base = OTHER; note = 2'-O- methyl, 3'- thiophosphate
  modified_base 23: mod_base = OTHER; note = 2'-O- methyl
tttgttctcaacttgaaaaggga

SEQ ID NO: 452 - RNA, 23 nt, synthetic construct
  source 1..23: mol_type = other RNA
  modified_base 1: mod_base = OTHER; note = 2'-O- methyl, 3'- thiophosphate
  modified_base 2: mod_base = OTHER; note = 2'- fluoro, 3'- thiophosphate
  modified_base 3: mod_base = OTHER; note = 2'-O- methyl
  modified_base 4: mod_base = OTHER; note = 2'-O- methyl
  modified_base 5: mod_base = OTHER; note = 2'-O- methyl
  modified_base 6: mod_base = OTHER; note = 2'- fluoro
  modified_base 7: mod_base = OTHER; note = 2'-O- methyl
  modified_base 8: mod_base = OTHER; note = 2'-O- methyl
  modified_base 9: mod_base = OTHER; note = 2'-O- methyl
  modified_base 10: mod_base = OTHER; note = 2'-O- methyl
  modified_base 11: mod_base = OTHER; note = 2'-O- methyl
  modified_base 12: mod_base = OTHER; note = 2'-O- methyl
  modified_base 13: mod_base = OTHER; note = 2'-O- methyl
  modified_base 14: mod_base = OTHER; note = 2'- fluoro
  modified_base 15: mod_base = OTHER; note = 2'-O- methyl
  modified_base 16: mod_base = OTHER; note = 2'- fluoro
  modified_base 17: mod_base = OTHER; note = 2'-O- methyl
  modified_base 18: mod_base = OTHER; note = 2'-O- methyl
  modified_base 19: mod_base = OTHER; note = 2'-O- methyl
  modified_base 20: mod_base = OTHER; note = 2'-O- methyl
  modified_base 21: mod_base = OTHER; note = 2'-O- methyl, 3'- thiophosphate
  modified_base 22: mod_base = OTHER; note = 2'-O- methyl, 3'- thiophosphate
  modified_base 23: mod_base = OTHER; note = 2'-O- methyl
tttgttctcaacttgaaaaggga

SEQ ID NO: 453 - RNA, 23 nt, synthetic construct
  source 1..23: mol_type = other RNA
  modified_base 1: mod_base = OTHER; note = 2'-O- methyl, 3'- thiophosphate, 5'-Ethenyl-(E)-phosphonate
  modified_base 2: mod_base = OTHER; note = 2'- fluoro, 3'- thiophosphate
  modified_base 3: mod_base = OTHER; note = 2'-O- methyl
  modified_base 4: mod_base = OTHER; note = 2'- fluoro
  modified_base 5: mod_base = OTHER; note = 2'- fluoro
  modified_base 6: mod_base = OTHER; note = 2'- fluoro
  modified_base 7: mod_base = OTHER; note = 2'-O- methyl
  modified_base 8: mod_base = OTHER; note = 2'-O- methyl
  modified_base 9: mod_base = OTHER; note = 2'-O- methyl
  modified_base 10: mod_base = OTHER; note = 2'-O- methyl
  modified_base 11: mod_base = OTHER; note = 2'-O- methyl
  modified_base 12: mod_base = OTHER; note = 2'-O- methyl
  modified_base 13: mod_base = OTHER; note = 2'-O- methyl
  modified_base 14: mod_base = OTHER; note = 2'- fluoro
  modified_base 15: mod_base = OTHER; note = 2'-O- methyl
  modified_base 16: mod_base = OTHER; note = 2'- fluoro
  modified_base 17: mod_base = OTHER; note = 2'-O- methyl
  modified_base 18: mod_base = OTHER; note = 2'-O- methyl
  modified_base 19: mod_base = OTHER; note = 2'-O- methyl
  modified_base 20: mod_base = OTHER; note = 2'-O- methyl
  modified_base 21: mod_base = OTHER; note = 2'-O- methyl, 3'- thiophosphate
  modified_base 22: mod_base = OTHER; note = 2'-O- methyl, 3'- thiophosphate
  modified_base 23: mod_base = OTHER; note = 2'-O- methyl
tcgactcattagaagaaaaggtg

SEQ ID NO: 454 - RNA, 23 nt, synthetic construct
  source 1..23: mol_type = other RNA
  modified_base 1: mod_base = OTHER; note = 2'-O- methyl, 3'- thiophosphate, 5'-Ethenyl-(E)-phosphonate
  modified_base 2: mod_base = OTHER; note = 2'- fluoro, 3'- thiophosphate
  modified_base 3: mod_base = OTHER; note = 2'- fluoro
  modified_base 4: mod_base = OTHER; note = 2'- fluoro
  modified_base 5: mod_base = OTHER; note = 2'-O- methyl
  modified_base 6: mod_base = OTHER; note = 2'- fluoro
  modified_base 7: mod_base = OTHER; note = 2'-O- methyl
  modified_base 8: mod_base = OTHER; note = 2'-O- methyl
  modified_base 9: mod_base = OTHER; note = 2'-O- methyl
  modified_base 10: mod_base = OTHER; note = 2'-O- methyl
  modified_base 11: mod_base = OTHER; note = 2'-O- methyl
  modified_base 12: mod_base = OTHER; note = 2'-O- methyl
  modified_base 13: mod_base = OTHER; note = 2'-O- methyl
  modified_base 14: mod_base = OTHER; note = 2'- fluoro
  modified_base 15: mod_base = OTHER; note = 2'-O- methyl
  modified_base 16: mod_base = OTHER; note = 2'- fluoro
  modified_base 17: mod_base = OTHER; note = 2'-O- methyl
  modified_base 18: mod_base = OTHER; note = 2'-O- methyl
  modified_base 19: mod_base = OTHER; note = 2'-O- methyl
  modified_base 20: mod_base = OTHER; note = 2'-O- methyl
  modified_base 21: mod_base = OTHER; note = 2'-O- methyl, 3'- thiophosphate
  modified_base 22: mod_base = OTHER; note = 2'-O- methyl, 3'- thiophosphate
  modified_base 23: mod_base = OTHER; note = 2'-O- methyl
tcgactcattagaagaaaaggtg

SEQ ID NO: 455 - RNA, 23 nt, synthetic construct
  source 1..23: mol_type = other RNA
  modified_base 1: mod_base = OTHER; note = 2'-O- methyl, 3'- thiophosphate, 5'-Ethenyl-(E)-phosphonate
  modified_base 2: mod_base = OTHER; note = 2'- fluoro, 3'- thiophosphate
  modified_base 3: mod_base = OTHER; note = 2'-O- methyl
  modified_base 4: mod_base = OTHER; note = 2'-O- methyl
  modified_base 5: mod_base = OTHER; note = 2'- fluoro
  modified_base 6: mod_base = OTHER; note = 2'- fluoro
  modified_base 7: mod_base = OTHER; note = 2'-O- methyl
  modified_base 8: mod_base = OTHER; note = 2'-O- methyl
  modified_base 9: mod_base = OTHER; note = 2'-O- methyl
  modified_base 10: mod_base = OTHER; note = 2'-O- methyl
  modified_base 11: mod_base = OTHER; note = 2'-O- methyl
  modified_base 12: mod_base = OTHER; note = 2'-O- methyl
  modified_base 13: mod_base = OTHER; note = 2'-O- methyl
  modified_base 14: mod_base = OTHER; note = 2'- fluoro
  modified_base 15: mod_base = OTHER; note = 2'-O- methyl
  modified_base 16: mod_base = OTHER; note = 2'- fluoro
  modified_base 17: mod_base = OTHER; note = 2'-O- methyl
  modified_base 18: mod_base = OTHER; note = 2'-O- methyl
  modified_base 19: mod_base = OTHER; note = 2'-O- methyl
  modified_base 20: mod_base = OTHER; note = 2'-O- methyl
  modified_base 21: mod_base = OTHER; note = 2'-O- methyl, 3'- thiophosphate
  modified_base 22: mod_base = OTHER; note = 2'-O- methyl, 3'- thiophosphate
  modified_base 23: mod_base = OTHER; note = 2'-O- methyl
tcgactcattagaagaaaaggtg

SEQ ID NO: 456 - RNA, 23 nt, synthetic construct
  source 1..23: mol_type = other RNA
  modified_base 1: mod_base = OTHER; note = 2'-O- methyl, 3'- thiophosphate, 5'-Ethenyl-(E)-phosphonate
  modified_base 2: mod_base = OTHER; note = 2'- fluoro, 3'- thiophosphate
  modified_base 3: mod_base = OTHER; note = 2'- fluoro
  modified_base 4: mod_base = OTHER; note = 2'-O- methyl
  modified_base 5: mod_base = OTHER; note = 2'-O- methyl
  modified_base 6: mod_base = OTHER; note = 2'- fluoro
  modified_base 7: mod_base = OTHER; note = 2'-O- methyl
  modified_base 8: mod_base = OTHER; note = 2'-O- methyl
  modified_base 9: mod_base = OTHER; note = 2'-O- methyl
  modified_base 10: mod_base = OTHER; note = 2'-O- methyl
  modified_base 11: mod_base = OTHER; note = 2'-O- methyl
  modified_base 12: mod_base = OTHER; note = 2'-O- methyl
  modified_base 13: mod_base = OTHER; note = 2'-O- methyl
  modified_base 14: mod_base = OTHER; note = 2'- fluoro
  modified_base 15: mod_base = OTHER; note = 2'-O- methyl
  modified_base 16: mod_base = OTHER; note = 2'- fluoro
  modified_base 17: mod_base = OTHER; note = 2'-O- methyl
  modified_base 18: mod_base = OTHER; note = 2'-O- methyl
  modified_base 19: mod_base = OTHER; note = 2'-O- methyl
  modified_base 20: mod_base = OTHER; note = 2'-O- methyl
  modified_base 21: mod_base = OTHER; note = 2'-O- methyl, 3'- thiophosphate
  modified_base 22: mod_base = OTHER; note = 2'-O- methyl, 3'- thiophosphate
  modified_base 23: mod_base = OTHER; note = 2'-O- methyl
tcgactcattagaagaaaaggtg

SEQ ID NO: 457 - RNA, 23 nt, synthetic construct
  source 1..23: mol_type = other RNA
  modified_base 1: mod_base = OTHER; note = 2'-O- methyl, 3'- thiophosphate, 5'-Ethenyl-(E)-phosphonate
  modified_base 2: mod_base = OTHER; note = 2'- fluoro, 3'- thiophosphate
  modified_base 3: mod_base = OTHER; note = 2'-O- methyl
  modified_base 4: mod_base = OTHER; note = 2'-O- methyl
  modified_base 5: mod_base = OTHER; note = 2'-O- methyl
  modified_base 6: mod_base = OTHER; note = 2'- fluoro
  modified_base 7: mod_base = OTHER; note = 2'-O- methyl
  modified_base 8: mod_base = OTHER; note = 2'-O- methyl
  modified_base 9: mod_base = OTHER; note = 2'-O- methyl
  modified_base 10: mod_base = OTHER; note = 2'-O- methyl
  modified_base 11: mod_base = OTHER; note = 2'-O- methyl
  modified_base 12: mod_base = OTHER; note = 2'-O- methyl
  modified_base 13: mod_base = OTHER; note = 2'-O- methyl
  modified_base 14: mod_base = OTHER; note = 2'- fluoro
  modified_base 15: mod_base = OTHER; note = 2'-O- methyl
  modified_base 16: mod_base = OTHER; note = 2'- fluoro
  modified_base 17: mod_base = OTHER; note = 2'-O- methyl
  modified_base 18: mod_base = OTHER; note = 2'-O- methyl
  modified_base 19: mod_base = OTHER; note = 2'-O- methyl
  modified_base 20: mod_base = OTHER; note = 2'-O- methyl
  modified_base 21: mod_base = OTHER; note = 2'-O- methyl, 3'- thiophosphate
  modified_base 22: mod_base = OTHER; note = 2'-O- methyl, 3'- thiophosphate
  modified_base 23: mod_base = OTHER; note = 2'-O- methyl
tcgactcattagaagaaaaggtg

SEQ ID NO: 458 - RNA, 23 nt, synthetic construct
  source 1..23: mol_type = other RNA
  modified_base 1: mod_base = OTHER; note = 2'-O- methyl, 3'- thiophosphate, 5'-Ethenyl-(E)-phosphonate
  modified_base 2: mod_base = OTHER; note = 2'- fluoro, 3'- thiophosphate
  modified_base 3: mod_base = OTHER; note = 2'- fluoro
  modified_base 4: mod_base = OTHER; note = 2'-O- methyl
  modified_base 5: mod_base = OTHER; note = 2'- fluoro
  modified_base 6: mod_base = OTHER; note = 2'- fluoro
  modified_base 7: mod_base = OTHER; note = 2'-O- methyl
  modified_base 8: mod_base = OTHER; note = 2'-O- methyl
  modified_base 9: mod_base = OTHER; note = 2'-O- methyl
  modified_base 10: mod_base = OTHER; note = 2'-O- methyl
  modified_base 11: mod_base = OTHER; note = 2'-O- methyl
  modified_base 12: mod_base = OTHER; note = 2'-O- methyl
  modified_base 13: mod_base = OTHER; note = 2'-O- methyl
  modified_base 14: mod_base = OTHER; note = 2'- fluoro
  modified_base 15: mod_base = OTHER; note = 2'-O- methyl
  modified_base 16: mod_base = OTHER; note = 2'- fluoro
  modified_base 17: mod_base = OTHER; note = 2'-O- methyl
  modified_base 18: mod_base = OTHER; note = 2'-O- methyl
  modified_base 19: mod_base = OTHER; note = 2'-O- methyl
  modified_base 20: mod_base = OTHER; note = 2'-O- methyl
  modified_base 21: mod_base = OTHER; note = 2'-O- methyl, 3'- thiophosphate
  modified_base 22: mod_base = OTHER; note = 2'-O- methyl, 3'- thiophosphate
  modified_base 23: mod_base = OTHER; note = 2'-O- methyl
tcgactcattagaagaaaaggtg

SEQ ID NO: 459 - RNA, 23 nt, synthetic construct
  source 1..23: mol_type = other RNA
  modified_base 1: mod_base = OTHER; note = 2'-O- methyl, 3'- thiophosphate
  modified_base 2: mod_base = OTHER; note = 2'- fluoro, 3'- thiophosphate
  modified_base 3: mod_base = OTHER; note = 2'-O- methyl
  modified_base 4: mod_base = OTHER; note = 2'-O- methyl
  modified_base 5: mod_base = OTHER; note = 2'-O- methyl
  modified_base 6: mod_base = OTHER; note = 2'- fluoro
  modified_base 7: mod_base = OTHER; note = 2'-O- methyl
  modified_base 8: mod_base = OTHER; note = 2'-O- methyl
  modified_base 9: mod_base = OTHER; note = 2'-O- methyl
  modified_base 10: mod_base = OTHER; note = 2'-O- methyl
  modified_base 11: mod_base = OTHER; note = 2'-O- methyl
  modified_base 12: mod_base = OTHER; note = 2'-O- methyl
  modified_base 13: mod_base = OTHER; note = 2'-O- methyl
  modified_base 14: mod_base = OTHER; note = 2'- fluoro
  modified_base 15: mod_base = OTHER; note = 2'-O- methyl
  modified_base 16: mod_base = OTHER; note = 2'- fluoro
  modified_base 17: mod_base = OTHER; note = 2'-O- methyl
  modified_base 18: mod_base = OTHER; note = 2'-O- methyl
  modified_base 19: mod_base = OTHER; note = 2'-O- methyl
  modified_base 20: mod_base = OTHER; note = 2'-O- methyl
  modified_base 21: mod_base = OTHER; note = 2'-O- methyl, 3'- thiophosphate
  modified_base 22: mod_base = OTHER; note = 2'-O- methyl, 3'- thiophosphate
  modified_base 23: mod_base = OTHER; note = 2'-O- methyl
tcgactcattagaagaaaaggtg

SEQ ID NO: 460 - RNA, 23 nt, synthetic construct
  source 1..23: mol_type = other RNA
  modified_base 1: mod_base = OTHER; note = 2'-O- methyl, 3'- thiophosphate, 5'-Ethenyl-(E)-phosphonate
  modified_base 2: mod_base = OTHER; note = 2'- fluoro, 3'- thiophosphate
  modified_base 3: mod_base = OTHER; note = 2'-O- methyl
  modified_base 4: mod_base = OTHER; note = 2'- fluoro
  modified_base 5: mod_base = OTHER; note = 2'- fluoro
  modified_base 6: mod_base = OTHER; note = 2'- fluoro
  modified_base 7: mod_base = OTHER; note = 2'-O- methyl
  modified_base 8: mod_base = OTHER; note = 2'-O- methyl
  modified_base 9: mod_base = OTHER; note = 2'-O- methyl
  modified_base 10: mod_base = OTHER; note = 2'-O- methyl
  modified_base 11: mod_base = OTHER; note = 2'-O- methyl
  modified_base 12: mod_base = OTHER; note = 2'-O- methyl
  modified_base 13: mod_base = OTHER; note = 2'-O- methyl
  modified_base 14: mod_base = OTHER; note = 2'- fluoro
  modified_base 15: mod_base = OTHER; note = 2'-O- methyl
  modified_base 16: mod_base = OTHER; note = 2'- fluoro
  modified_base 17: mod_base = OTHER; note = 2'-O- methyl
  modified_base 18: mod_base = OTHER; note = 2'-O- methyl
  modified_base 19: mod_base = OTHER; note = 2'-O- methyl
  modified_base 20: mod_base = OTHER; note = 2'-O- methyl
  modified_base 21: mod_base = OTHER; note = 2'-O- methyl, 3'- thiophosphate
  modified_base 22: mod_base = OTHER; note = 2'-O- methyl, 3'- thiophosphate
  modified_base 23: mod_base = OTHER; note = 2'-O- methyl
atactttaattttaaaacccaat

SEQ ID NO: 461 - RNA, 23 nt, synthetic construct
  source 1..23: mol_type = other RNA
  modified_base 1: mod_base = OTHER; note = 2'-O- methyl, 3'- thiophosphate, 5'-Ethenyl-(E)-phosphonate
  modified_base 2: mod_base = OTHER; note = 2'- fluoro, 3'- thiophosphate
  modified_base 3: mod_base = OTHER; note = 2'- fluoro
  modified_base 4: mod_base = OTHER; note = 2'- fluoro
  modified_base 5: mod_base = OTHER; note = 2'-O- methyl
  modified_base 6: mod_base = OTHER; note = 2'- fluoro
  modified_base 7: mod_base = OTHER; note = 2'-O- methyl
  modified_base 8: mod_base = OTHER; note = 2'-O- methyl
  modified_base 9: mod_base = OTHER; note = 2'-O- methyl
  modified_base 10: mod_base = OTHER; note = 2'-O- methyl
  modified_base 11: mod_base = OTHER; note = 2'-O- methyl
  modified_base 12: mod_base = OTHER; note = 2'-O- methyl
  modified_base 13: mod_base = OTHER; note = 2'-O- methyl
  modified_base 14: mod_base = OTHER; note = 2'- fluoro
  modified_base 15: mod_base = OTHER; note = 2'-O- methyl
  modified_base 16: mod_base = OTHER; note = 2'- fluoro
  modified_base 17: mod_base = OTHER; note = 2'-O- methyl
  modified_base 18: mod_base = OTHER; note = 2'-O- methyl
  modified_base 19: mod_base = OTHER; note = 2'-O- methyl
  modified_base 20: mod_base = OTHER; note = 2'-O- methyl
  modified_base 21: mod_base = OTHER; note = 2'-O- methyl, 3'- thiophosphate
  modified_base 22: mod_base = OTHER; note = 2'-O- methyl, 3'- thiophosphate
  modified_base 23: mod_base = OTHER; note = 2'-O- methyl
atactttaattttaaaacccaat

SEQ ID NO: 462 - RNA, 23 nt, synthetic construct
  source 1..23: mol_type = other RNA
  modified_base 1: mod_base = OTHER; note = 2'-O- methyl, 3'- thiophosphate, 5'-Ethenyl-(E)-phosphonate
  modified_base 2: mod_base = OTHER; note = 2'- fluoro, 3'- thiophosphate
  modified_base 3: mod_base = OTHER; note = 2'-O- methyl
  modified_base 4: mod_base = OTHER; note = 2'-O- methyl
  modified_base 5: mod_base = OTHER; note = 2'- fluoro
  modified_base 6: mod_base = OTHER; note = 2'- fluoro
  modified_base 7: mod_base = OTHER; note = 2'-O- methyl
  modified_base 8: mod_base = OTHER; note = 2'-O- methyl
  modified_base 9: mod_base = OTHER; note = 2'-O- methyl
  modified_base 10: mod_base = OTHER; note = 2'-O- methyl
  modified_base 11: mod_base = OTHER; note = 2'-O- methyl
  modified_base 12: mod_base = OTHER; note = 2'-O- methyl
  modified_base 13: mod_base = OTHER; note = 2'-O- methyl
  modified_base 14: mod_base = OTHER; note = 2'- fluoro
  modified_base 15: mod_base = OTHER; note = 2'-O- methyl
  modified_base 16: mod_base = OTHER; note = 2'- fluoro
  modified_base 17: mod_base = OTHER; note = 2'-O- methyl
  modified_base 18: mod_base = OTHER; note = 2'-O- methyl
  modified_base 19: mod_base = OTHER; note = 2'-O- methyl
  modified_base 20: mod_base = OTHER; note = 2'-O- methyl
  modified_base 21: mod_base = OTHER; note = 2'-O- methyl, 3'- thiophosphate
  modified_base 22: mod_base = OTHER; note = 2'-O- methyl, 3'- thiophosphate
  modified_base 23: mod_base = OTHER; note = 2'-O- methyl
atactttaattttaaaacccaat

SEQ ID NO: 463 - RNA, 23 nt, synthetic construct
  source 1..23: mol_type = other RNA
  modified_base 1: mod_base = OTHER; note = 2'-O- methyl, 3'- thiophosphate, 5'-Ethenyl-(E)-phosphonate
  modified_base 2: mod_base = OTHER; note = 2'- fluoro, 3'- thiophosphate
  modified_base 3: mod_base = OTHER; note = 2'- fluoro
  modified_base 4: mod_base = OTHER; note = 2'-O- methyl
  modified_base 5: mod_base = OTHER; note = 2'-O- methyl
  modified_base 6: mod_base = OTHER; note = 2'- fluoro
  modified_base 7: mod_base = OTHER; note = 2'-O- methyl
  modified_base 8: mod_base = OTHER; note = 2'-O- methyl
  modified_base 9: mod_base = OTHER; note = 2'-O- methyl
  modified_base 10: mod_base = OTHER; note = 2'-O- methyl
  modified_base 11: mod_base = OTHER; note = 2'-O- methyl
  modified_base 12: mod_base = OTHER; note = 2'-O- methyl
  modified_base 13: mod_base = OTHER; note = 2'-O- methyl
  modified_base 14: mod_base = OTHER; note = 2'- fluoro
  modified_base 15: mod_base = OTHER; note = 2'-O- methyl
  modified_base 16: mod_base = OTHER; note = 2'- fluoro
  modified_base 17: mod_base = OTHER; note = 2'-O- methyl
  modified_base 18: mod_base = OTHER; note = 2'-O- methyl
  modified_base 19: mod_base = OTHER; note = 2'-O- methyl
  modified_base 20: mod_base = OTHER; note = 2'-O- methyl
  modified_base 21: mod_base = OTHER; note = 2'-O- methyl, 3'- thiophosphate
  modified_base 22: mod_base = OTHER; note = 2'-O- methyl, 3'- thiophosphate
  modified_base 23: mod_base = OTHER; note = 2'-O- methyl
atactttaattttaaaacccaat

SEQ ID NO: 464 - RNA, 23 nt, synthetic construct
  source 1..23: mol_type = other RNA
  modified_base 1: mod_base = OTHER; note = 2'-O- methyl, 3'- thiophosphate, 5'-Ethenyl-(E)-phosphonate
  modified_base 2: mod_base = OTHER; note = 2'- fluoro, 3'- thiophosphate
  modified_base 3: mod_base = OTHER; note = 2'-O- methyl
  modified_base 4: mod_base = OTHER; note = 2'- fluoro
  modified_base 5: mod_base = OTHER; note = 2'- fluoro
  modified_base 6: mod_base = OTHER; note = 2'- fluoro
  modified_base 7: mod_base = OTHER; note = 2'-O- methyl
  modified_base 8: mod_base = OTHER; note = 2'-O- methyl
  modified_base 9: mod_base = OTHER; note = 2'-O- methyl
  modified_base 10: mod_base = OTHER; note = 2'-O- methyl
  modified_base 11: mod_base = OTHER; note = 2'-O- methyl
  modified_base 12: mod_base = OTHER; note = 2'-O- methyl
  modified_base 13: mod_base = OTHER; note = 2'-O- methyl
  modified_base 14: mod_base = OTHER; note = 2'- fluoro
  modified_base 15: mod_base = OTHER; note = 2'-O- methyl
  modified_base 16: mod_base = OTHER; note = 2'- fluoro
  modified_base 17: mod_base = OTHER; note = 2'-O- methyl
  modified_base 18: mod_base = OTHER; note = 2'-O- methyl
  modified_base 19: mod_base = OTHER; note = 2'-O- methyl
  modified_base 20: mod_base = OTHER; note = 2'-O- methyl
  modified_base 21: mod_base = OTHER; note = 2'-O- methyl, 3'- thiophosphate
  modified_base 22: mod_base = OTHER; note = 2'-O- methyl, 3'- thiophosphate
  modified_base 23: mod_base = OTHER; note = 2'-O- methyl
acacttttttgtttcacaaacaa

SEQ ID NO: 465 - RNA, 23 nt, synthetic construct
  source 1..23: mol_type = other RNA
  modified_base 1: mod_base = OTHER; note = 2'-O- methyl, 3'- thiophosphate, 5'-Ethenyl-(E)-phosphonate
  modified_base 2: mod_base = OTHER; note = 2'- fluoro, 3'- thiophosphate
  modified_base 3: mod_base = OTHER; note = 2'- fluoro
  modified_base 4: mod_base = OTHER; note = 2'- fluoro
  modified_base 5: mod_base = OTHER; note = 2'-O- methyl
  modified_base 6: mod_base = OTHER; note = 2'- fluoro
  modified_base 7: mod_base = OTHER; note = 2'-O- methyl
  modified_base 8: mod_base = OTHER; note = 2'-O- methyl
  modified_base 9: mod_base = OTHER; note = 2'-O- methyl
  modified_base 10: mod_base = OTHER; note = 2'-O- methyl
  modified_base 11: mod_base = OTHER; note = 2'-O- methyl
  modified_base 12: mod_base = OTHER; note = 2'-O- methyl
  modified_base 13: mod_base = OTHER; note = 2'-O- methyl
  modified_base 14: mod_base = OTHER; note = 2'- fluoro
  modified_base 15: mod_base = OTHER; note = 2'-O- methyl
  modified_base 16: mod_base = OTHER; note = 2'- fluoro
  modified_base 17: mod_base = OTHER; note = 2'-O- methyl
  modified_base 18: mod_base = OTHER; note = 2'-O- methyl
  modified_base 19: mod_base = OTHER; note = 2'-O- methyl
  modified_base 20: mod_base = OTHER; note = 2'-O- methyl
  modified_base 21: mod_base = OTHER; note = 2'-O- methyl, 3'- thiophosphate
  modified_base 22: mod_base = OTHER; note = 2'-O- methyl, 3'- thiophosphate
  modified_base 23: mod_base = OTHER; note = 2'-O- methyl
acacttttttgtttcacaaacaa

SEQ ID NO: 466 - RNA, 23 nt, synthetic construct
  source 1..23: mol_type = other RNA
  modified_base 1: mod_base = OTHER; note = 2'-O- methyl, 3'- thiophosphate, 5'-Ethenyl-(E)-phosphonate
  modified_base 2: mod_base = OTHER; note = 2'- fluoro, 3'- thiophosphate
  modified_base 3: mod_base = OTHER; note = 2'-O- methyl
  modified_base 4: mod_base = OTHER; note = 2'-O- methyl
  modified_base 5: mod_base = OTHER; note = 2'- fluoro
  modified_base 6: mod_base = OTHER; note = 2'- fluoro
  modified_base 7: mod_base = OTHER; note = 2'-O- methyl
  modified_base 8: mod_base = OTHER; note = 2'-O- methyl
  modified_base 9: mod_base = OTHER; note = 2'-O- methyl
  modified_base 10: mod_base = OTHER; note = 2'-O- methyl
  modified_base 11: mod_base = OTHER; note = 2'-O- methyl
  modified_base 12: mod_base = OTHER; note = 2'-O- methyl
  modified_base 13: mod_base = OTHER; note = 2'-O- methyl
  modified_base 14: mod_base = OTHER; note = 2'- fluoro
  modified_base 15: mod_base = OTHER; note = 2'-O- methyl
  modified_base 16: mod_base = OTHER; note = 2'- fluoro
  modified_base 17: mod_base = OTHER; note = 2'-O- methyl
  modified_base 18: mod_base = OTHER; note = 2'-O- methyl
  modified_base 19: mod_base = OTHER; note = 2'-O- methyl
  modified_base 20: mod_base = OTHER; note = 2'-O- methyl
  modified_base 21: mod_base = OTHER; note = 2'-O- methyl, 3'- thiophosphate
  modified_base 22: mod_base = OTHER; note = 2'-O- methyl, 3'- thiophosphate
  modified_base 23: mod_base = OTHER; note = 2'-O- methyl
acacttttttgtttcacaaacaa

SEQ ID NO: 467 - RNA, 23 nt, synthetic construct
  source 1..23: mol_type = other RNA
  modified_base 1: mod_base = OTHER; note = 2'-O- methyl, 3'- thiophosphate, 5'-Ethenyl-(E)-phosphonate
  modified_base 2: mod_base = OTHER; note = 2'- fluoro, 3'- thiophosphate
  modified_base 3: mod_base = OTHER; note = 2'- fluoro
  modified_base 4: mod_base = OTHER; note = 2'-O- methyl
  modified_base 5: mod_base = OTHER; note = 2'-O- methyl
  modified_base 6: mod_base = OTHER; note = 2'- fluoro
  modified_base 7: mod_base = OTHER; note = 2'-O- methyl
  modified_base 8: mod_base = OTHER; note = 2'-O- methyl
  modified_base 9: mod_base = OTHER; note = 2'-O- methyl
  modified_base 10: mod_base = OTHER; note = 2'-O- methyl
  modified_base 11: mod_base = OTHER; note = 2'-O- methyl
  modified_base 12: mod_base = OTHER; note = 2'-O- methyl
  modified_base 13: mod_base = OTHER; note = 2'-O- methyl
  modified_base 14: mod_base = OTHER; note = 2'- fluoro
  modified_base 15: mod_base = OTHER; note = 2'-O- methyl
  modified_base 16: mod_base = OTHER; note = 2'- fluoro
  modified_base 17: mod_base = OTHER; note = 2'-O- methyl
  modified_base 18: mod_base = OTHER; note = 2'-O- methyl
  modified_base 19: mod_base = OTHER; note = 2'-O- methyl
  modified_base 20: mod_base = OTHER; note = 2'-O- methyl
  modified_base 21: mod_base = OTHER; note = 2'-O- methyl, 3'- thiophosphate
  modified_base 22: mod_base = OTHER; note = 2'-O- methyl, 3'- thiophosphate
  modified_base 23: mod_base = OTHER; note = 2'-O- methyl
acacttttttgtttcacaaacaa

SEQ ID NO: 468 - RNA, 23 nt, synthetic construct
  source 1..23: mol_type = other RNA
  modified_base 1: mod_base = OTHER; note = 2'-O- methyl, 3'- thiophosphate, 5'-Ethenyl-(E)-phosphonate
  modified_base 2: mod_base = OTHER; note = 2'- fluoro, 3'- thiophosphate
  modified_base 3: mod_base = OTHER; note = 2'-O- methyl
  modified_base 4: mod_base = OTHER; note = 2'-O- methyl
  modified_base 5: mod_base = OTHER; note = 2'-O- methyl
  modified_base 6: mod_base = OTHER; note = 2'- fluoro
  modified_base 7: mod_base = OTHER; note = 2'-O- methyl
  modified_base 8: mod_base = OTHER; note = 2'-O- methyl
  modified_base 9: mod_base = OTHER; note = 2'-O- methyl
  modified_base 10: mod_base = OTHER; note = 2'-O- methyl
  modified_base 11: mod_base = OTHER; note = 2'-O- methyl
  modified_base 12: mod_base = OTHER; note = 2'-O- methyl
  modified_base 13: mod_base = OTHER; note = 2'-O- methyl
  modified_base 14: mod_base = OTHER; note = 2'- fluoro
  modified_base 15: mod_base = OTHER; note = 2'-O- methyl
  modified_base 16: mod_base = OTHER; note = 2'- fluoro
  modified_base 17: mod_base = OTHER; note = 2'-O- methyl
  modified_base 18: mod_base = OTHER; note = 2'-O- methyl
  modified_base 19: mod_base = OTHER; note = 2'-O- methyl
  modified_base 20: mod_base = OTHER; note = 2'-O- methyl
  modified_base 21: mod_base = OTHER; note = 2'-O- methyl, 3'- thiophosphate
  modified_base 22: mod_base = OTHER; note = 2'-O- methyl, 3'- thiophosphate
  modified_base 23: mod_base = OTHER; note = 2'-O- methyl
acacttttttgtttcacaaacaa

SEQ ID NO: 469 - RNA, 23 nt, synthetic construct
  source 1..23: mol_type = other RNA
  modified_base 1: mod_base = OTHER; note = 2'-O- methyl, 3'- thiophosphate, 5'-Ethenyl-(E)-phosphonate
  modified_base 2: mod_base = OTHER; note = 2'- fluoro, 3'- thiophosphate
  modified_base 3: mod_base = OTHER; note = 2'- fluoro
  modified_base 4: mod_base = OTHER; note = 2'-O- methyl
  modified_base 5: mod_base = OTHER; note = 2'- fluoro
  modified_base 6: mod_base = OTHER; note = 2'- fluoro
  modified_base 7: mod_base = OTHER; note = 2'-O- methyl
  modified_base 8: mod_base = OTHER; note = 2'-O- methyl
  modified_base 9: mod_base = OTHER; note = 2'-O- methyl
  modified_base 10: mod_base = OTHER; note = 2'-O- methyl
  modified_base 11: mod_base = OTHER; note = 2'-O- methyl
  modified_base 12: mod_base = OTHER; note = 2'-O- methyl
  modified_base 13: mod_base = OTHER; note = 2'-O- methyl
  modified_base 14: mod_base = OTHER; note = 2'- fluoro
  modified_base 15: mod_base = OTHER; note = 2'-O- methyl
  modified_base 16: mod_base = OTHER; note = 2'- fluoro
  modified_base 17: mod_base = OTHER; note = 2'-O- methyl
  modified_base 18: mod_base = OTHER; note = 2'-O- methyl
  modified_base 19: mod_base = OTHER; note = 2'-O- methyl
  modified_base 20: mod_base = OTHER; note = 2'-O- methyl
  modified_base 21: mod_base = OTHER; note = 2'-O- methyl, 3'- thiophosphate
  modified_base 22: mod_base = OTHER; note = 2'-O- methyl, 3'- thiophosphate
  modified_base 23: mod_base = OTHER; note = 2'-O- methyl
acacttttttgtttcacaaacaa

SEQ ID NO: 470 - RNA, 23 nt, synthetic construct
  source 1..23: mol_type = other RNA
  modified_base 1: mod_base = OTHER; note = 2'-O- methyl, 3'- thiophosphate
  modified_base 2: mod_base = OTHER; note = 2'- fluoro, 3'- thiophosphate
  modified_base 3: mod_base = OTHER; note = 2'-O- methyl
  modified_base 4: mod_base = OTHER; note = 2'-O- methyl
  modified_base 5: mod_base = OTHER; note = 2'-O- methyl
  modified_base 6: mod_base = OTHER; note = 2'- fluoro
  modified_base 7: mod_base = OTHER; note = 2'-O- methyl
  modified_base 8: mod_base = OTHER; note = 2'-O- methyl
  modified_base 9: mod_base = OTHER; note = 2'-O- methyl
  modified_base 10: mod_base = OTHER; note = 2'-O- methyl
  modified_base 11: mod_base = OTHER; note = 2'-O- methyl
  modified_base 12: mod_base = OTHER; note = 2'-O- methyl
  modified_base 13: mod_base = OTHER; note = 2'-O- methyl
  modified_base 14: mod_base = OTHER; note = 2'- fluoro
  modified_base 15: mod_base = OTHER; note = 2'-O- methyl
  modified_base 16: mod_base = OTHER; note = 2'- fluoro
  modified_base 17: mod_base = OTHER; note = 2'-O- methyl
  modified_base 18: mod_base = OTHER; note = 2'-O- methyl
  modified_base 19: mod_base = OTHER; note = 2'-O- methyl
  modified_base 20: mod_base = OTHER; note = 2'-O- methyl
  modified_base 21: mod_base = OTHER; note = 2'-O- methyl, 3'- thiophosphate
  modified_base 22: mod_base = OTHER; note = 2'-O- methyl, 3'- thiophosphate
  modified_base 23: mod_base = OTHER; note = 2'-O- methyl
acacttttttgtttcacaaacaa

SEQ ID NO: 471 - RNA, 23 nt, synthetic construct
  source 1..23: mol_type = other RNA
  modified_base 1: mod_base = OTHER; note = 2'-O- methyl, 3'- thiophosphate, 5'-Ethenyl-(E)-phosphonate
  modified_base 2: mod_base = OTHER; note = 2'- fluoro, 3'- thiophosphate
  modified_base 3: mod_base = OTHER; note = 2'-O- methyl
  modified_base 4: mod_base = OTHER; note = 2'- fluoro
  modified_base 5: mod_base = OTHER; note = 2'- fluoro
  modified_base 6: mod_base = OTHER; note = 2'- fluoro
  modified_base 7: mod_base = OTHER; note = 2'-O- methyl
  modified_base 8: mod_base = OTHER; note = 2'-O- methyl
  modified_base 9: mod_base = OTHER; note = 2'-O- methyl
  modified_base 10: mod_base = OTHER; note = 2'-O- methyl
  modified_base 11: mod_base = OTHER; note = 2'-O- methyl
  modified_base 12: mod_base = OTHER; note = 2'-O- methyl
  modified_base 13: mod_base = OTHER; note = 2'-O- methyl
  modified_base 14: mod_base = OTHER; note = 2'- fluoro
  modified_base 15: mod_base = OTHER; note = 2'-O- methyl
  modified_base 16: mod_base = OTHER; note = 2'- fluoro
  modified_base 17: mod_base = OTHER; note = 2'-O- methyl
  modified_base 18: mod_base = OTHER; note = 2'-O- methyl
  modified_base 19: mod_base = OTHER; note = 2'-O- methyl
  modified_base 20: mod_base = OTHER; note = 2'-O- methyl
  modified_base 21: mod_base = OTHER; note = 2'-O- methyl, 3'- thiophosphate
  modified_base 22: mod_base = OTHER; note = 2'-O- methyl, 3'- thiophosphate
  modified_base 23: mod_base = OTHER; note = 2'-O- methyl
tgtatactttaattttaaaaccc

SEQ ID NO: 472 - RNA, 23 nt, synthetic construct
  source 1..23: mol_type = other RNA
  modified_base 1: mod_base = OTHER; note = 2'-O- methyl, 3'- thiophosphate, 5'-Ethenyl-(E)-phosphonate
  modified_base 2: mod_base = OTHER; note = 2'- fluoro, 3'- thiophosphate
  modified_base 3: mod_base = OTHER; note = 2'- fluoro
  modified_base 4: mod_base = OTHER; note = 2'- fluoro
  modified_base 5: mod_base = OTHER; note = 2'-O- methyl
  modified_base 6: mod_base = OTHER; note = 2'- fluoro
  modified_base 7: mod_base = OTHER; note = 2'-O- methyl
  modified_base 8: mod_base = OTHER; note = 2'-O- methyl
  modified_base 9: mod_base = OTHER; note = 2'-O- methyl
  modified_base 10: mod_base = OTHER; note = 2'-O- methyl
  modified_base 11: mod_base = OTHER; note = 2'-O- methyl
  modified_base 12: mod_base = OTHER; note = 2'-O- methyl
  modified_base 13: mod_base = OTHER; note = 2'-O- methyl
  modified_base 14: mod_base = OTHER; note = 2'- fluoro
  modified_base 15: mod_base = OTHER; note = 2'-O- methyl
  modified_base 16: mod_base = OTHER; note = 2'- fluoro
  modified_base 17: mod_base = OTHER; note = 2'-O- methyl
  modified_base 18: mod_base = OTHER; note = 2'-O- methyl
  modified_base 19: mod_base = OTHER; note = 2'-O- methyl
  modified_base 20: mod_base = OTHER; note = 2'-O- methyl
  modified_base 21: mod_base = OTHER; note = 2'-O- methyl, 3'- thiophosphate
  modified_base 22: mod_base = OTHER; note = 2'-O- methyl, 3'- thiophosphate
  modified_base 23: mod_base = OTHER; note = 2'-O- methyl
tgtatactttaattttaaaaccc

SEQ ID NO: 473 - RNA, 23 nt, synthetic construct
  source 1..23: mol_type = other RNA
  modified_base 1: mod_base = OTHER; note = 2'-O- methyl, 3'- thiophosphate, 5'-Ethenyl-(E)-phosphonate
  modified_base 2: mod_base = OTHER; note = 2'- fluoro, 3'- thiophosphate
  modified_base 3: mod_base = OTHER; note = 2'-O- methyl
  modified_base 4: mod_base = OTHER; note = 2'-O- methyl
  modified_base 5: mod_base = OTHER; note = 2'- fluoro
  modified_base 6: mod_base = OTHER; note = 2'- fluoro
  modified_base 7: mod_base = OTHER; note = 2'-O- methyl
  modified_base 8: mod_base = OTHER; note = 2'-O- methyl
  modified_base 9: mod_base = OTHER; note = 2'-O- methyl
  modified_base 10: mod_base = OTHER; note = 2'-O- methyl
  modified_base 11: mod_base = OTHER; note = 2'-O- methyl
  modified_base 12: mod_base = OTHER; note = 2'-O- methyl
  modified_base 13: mod_base = OTHER; note = 2'-O- methyl
  modified_base 14: mod_base = OTHER; note = 2'- fluoro
  modified_base 15: mod_base = OTHER; note = 2'-O- methyl
  modified_base 16: mod_base = OTHER; note = 2'- fluoro
  modified_base 17: mod_base = OTHER; note = 2'-O- methyl
  modified_base 18: mod_base = OTHER; note = 2'-O- methyl
  modified_base 19: mod_base = OTHER; note = 2'-O- methyl
  modified_base 20: mod_base = OTHER; note = 2'-O- methyl
  modified_base 21: mod_base = OTHER; note = 2'-O- methyl, 3'- thiophosphate
  modified_base 22: mod_base = OTHER; note = 2'-O- methyl, 3'- thiophosphate
  modified_base 23: mod_base = OTHER; note = 2'-O- methyl
tgtatactttaattttaaaaccc

SEQ ID NO: 474 - RNA, 23 nt, synthetic construct
  source 1..23: mol_type = other RNA
  modified_base 1: mod_base = OTHER; note = 2'-O- methyl, 3'- thiophosphate, 5'-Ethenyl-(E)-phosphonate
  modified_base 2: mod_base = OTHER; note = 2'- fluoro, 3'- thiophosphate
  modified_base 3: mod_base = OTHER; note = 2'- fluoro
  modified_base 4: mod_base = OTHER; note = 2'-O- methyl
  modified_base 5: mod_base = OTHER; note = 2'-O- methyl
  modified_base 6: mod_base = OTHER; note = 2'- fluoro
  modified_base 7: mod_base = OTHER; note = 2'-O- methyl
  modified_base 8: mod_base = OTHER; note = 2'-O- methyl
  modified_base 9: mod_base = OTHER; note = 2'-O- methyl
  modified_base 10: mod_base = OTHER; note = 2'-O- methyl
  modified_base 11: mod_base = OTHER; note = 2'-O- methyl
  modified_base 12: mod_base = OTHER; note = 2'-O- methyl
  modified_base 13: mod_base = OTHER; note = 2'-O- methyl
  modified_base 14: mod_base = OTHER; note = 2'- fluoro
  modified_base 15: mod_base = OTHER; note = 2'-O- methyl
  modified_base 16: mod_base = OTHER; note = 2'- fluoro
  modified_base 17: mod_base = OTHER; note = 2'-O- methyl
  modified_base 18: mod_base = OTHER; note = 2'-O- methyl
  modified_base 19: mod_base = OTHER; note = 2'-O- methyl
  modified_base 20: mod_base = OTHER; note = 2'-O- methyl
  modified_base 21: mod_base = OTHER; note = 2'-O- methyl, 3'- thiophosphate
  modified_base 22: mod_base = OTHER; note = 2'-O- methyl, 3'- thiophosphate
  modified_base 23: mod_base = OTHER; note = 2'-O- methyl
tgtatactttaattttaaaaccc

SEQ ID NO: 475 - RNA, 23 nt, synthetic construct
  source 1..23: mol_type = other RNA
  modified_base 1: mod_base = OTHER; note = 2'-O- methyl, 3'- thiophosphate, 5'-Ethenyl-(E)-phosphonate
  modified_base 2: mod_base = OTHER; note = 2'- fluoro, 3'- thiophosphate
  modified_base 3: mod_base = OTHER; note = 2'-O- methyl
  modified_base 4: mod_base = OTHER; note = 2'- fluoro
  modified_base 5: mod_base = OTHER; note = 2'- fluoro
  modified_base 6: mod_base = OTHER; note = 2'- fluoro
  modified_base 7: mod_base = OTHER; note = 2'-O- methyl
  modified_base 8: mod_base = OTHER; note = 2'-O- methyl
  modified_base 9: mod_base = OTHER; note = 2'-O- methyl
  modified_base 10: mod_base = OTHER; note = 2'-O- methyl
  modified_base 11: mod_base = OTHER; note = 2'-O- methyl
  modified_base 12: mod_base = OTHER; note = 2'-O- methyl
  modified_base 13: mod_base = OTHER; note = 2'-O- methyl
  modified_base 14: mod_base = OTHER; note = 2'- fluoro
  modified_base 15: mod_base = OTHER; note = 2'-O- methyl
  modified_base 16: mod_base = OTHER; note = 2'- fluoro
  modified_base 17: mod_base = OTHER; note = 2'-O- methyl
  modified_base 18: mod_base = OTHER; note = 2'-O- methyl
  modified_base 19: mod_base = OTHER; note = 2'-O- methyl
  modified_base 20: mod_base = OTHER; note = 2'-O- methyl
  modified_base 21: mod_base = OTHER; note = 2'-O- methyl, 3'- thiophosphate
  modified_base 22: mod_base = OTHER; note = 2'-O- methyl, 3'- thiophosphate
  modified_base 23: mod_base = OTHER; note = 2'-O- methyl
taacacttttttgtttcacaaac

SEQ ID NO: 476 - RNA, 23 nt, synthetic construct
  source 1..23: mol_type = other RNA
  modified_base 1: mod_base = OTHER; note = 2'-O- methyl, 3'- thiophosphate, 5'-Ethenyl-(E)-phosphonate
  modified_base 2: mod_base = OTHER; note = 2'- fluoro, 3'- thiophosphate
  modified_base 3: mod_base = OTHER; note = 2'- fluoro
  modified_base 4: mod_base = OTHER; note = 2'- fluoro
  modified_base 5: mod_base = OTHER; note = 2'-O- methyl
  modified_base 6: mod_base = OTHER; note = 2'- fluoro
  modified_base 7: mod_base = OTHER; note = 2'-O- methyl
  modified_base 8: mod_base = OTHER; note = 2'-O- methyl
  modified_base 9: mod_base = OTHER; note = 2'-O- methyl
  modified_base 10: mod_base = OTHER; note = 2'-O- methyl
  modified_base 11: mod_base = OTHER; note = 2'-O- methyl
  modified_base 12: mod_base = OTHER; note = 2'-O- methyl
  modified_base 13: mod_base = OTHER; note = 2'-O- methyl
  modified_base 14: mod_base = OTHER; note = 2'- fluoro
  modified_base 15: mod_base = OTHER; note = 2'-O- methyl
  modified_base 16: mod_base = OTHER; note = 2'- fluoro
  modified_base 17: mod_base = OTHER; note = 2'-O- methyl
  modified_base 18: mod_base = OTHER; note = 2'-O- methyl
  modified_base 19: mod_base = OTHER; note = 2'-O- methyl
  modified_base 20: mod_base = OTHER; note = 2'-O- methyl
  modified_base 21: mod_base = OTHER; note = 2'-O- methyl, 3'- thiophosphate
  modified_base 22: mod_base = OTHER; note = 2'-O- methyl, 3'- thiophosphate
  modified_base 23: mod_base = OTHER; note = 2'-O- methyl
taacacttttttgtttcacaaac

SEQ ID NO: 477 - RNA, 23 nt, synthetic construct
  source 1..23: mol_type = other RNA
  modified_base 1: mod_base = OTHER; note = 2'-O- methyl, 3'- thiophosphate, 5'-Ethenyl-(E)-phosphonate
  modified_base 2: mod_base = OTHER; note = 2'- fluoro, 3'- thiophosphate
  modified_base 3: mod_base = OTHER; note = 2'-O- methyl
  modified_base 4: mod_base = OTHER; note = 2'-O- methyl
  modified_base 5: mod_base = OTHER; note = 2'- fluoro
  modified_base 6: mod_base = OTHER; note = 2'- fluoro
  modified_base 7: mod_base = OTHER; note = 2'-O- methyl
  modified_base 8: mod_base = OTHER; note = 2'-O- methyl
  modified_base 9: mod_base = OTHER; note = 2'-O- methyl
  modified_base 10: mod_base = OTHER; note = 2'-O- methyl
  modified_base 11: mod_base = OTHER; note = 2'-O- methyl
  modified_base 12: mod_base = OTHER; note = 2'-O- methyl
  modified_base 13: mod_base = OTHER; note = 2'-O- methyl
  modified_base 14: mod_base = OTHER; note = 2'- fluoro
  modified_base 15: mod_base = OTHER; note = 2'-O- methyl
  modified_base 16: mod_base = OTHER; note = 2'- fluoro
  modified_base 17: mod_base = OTHER; note = 2'-O- methyl
  modified_base 18: mod_base = OTHER; note = 2'-O- methyl
  modified_base 19: mod_base = OTHER; note = 2'-O- methyl
  modified_base 20: mod_base = OTHER; note = 2'-O- methyl
  modified_base 21: mod_base = OTHER; note = 2'-O- methyl, 3'- thiophosphate
  modified_base 22: mod_base = OTHER; note = 2'-O- methyl, 3'- thiophosphate
  modified_base 23: mod_base = OTHER; note = 2'-O- methyl
taacacttttttgtttcacaaac

SEQ ID NO: 478 - RNA, 23 nt, synthetic construct
  source 1..23: mol_type = other RNA
  modified_base 1: mod_base = OTHER; note = 2'-O- methyl, 3'- thiophosphate, 5'-Ethenyl-(E)-phosphonate
  modified_base 2: mod_base = OTHER; note = 2'- fluoro, 3'- thiophosphate
  modified_base 3: mod_base = OTHER; note = 2'- fluoro
  modified_base 4: mod_base = OTHER; note = 2'-O- methyl
  modified_base 5: mod_base = OTHER; note = 2'-O- methyl
  modified_base 6: mod_base = OTHER; note = 2'- fluoro
  modified_base 7: mod_base = OTHER; note = 2'-O- methyl
  modified_base 8: mod_base = OTHER; note = 2'-O- methyl
  modified_base 9: mod_base = OTHER; note = 2'-O- methyl
  modified_base 10: mod_base = OTHER; note = 2'-O- methyl
  modified_base 11: mod_base = OTHER; note = 2'-O- methyl
  modified_base 12: mod_base = OTHER; note = 2'-O- methyl
  modified_base 13: mod_base = OTHER; note = 2'-O- methyl
  modified_base 14: mod_base = OTHER; note = 2'- fluoro
  modified_base 15: mod_base = OTHER; note = 2'-O- methyl
  modified_base 16: mod_base = OTHER; note = 2'- fluoro
  modified_base 17: mod_base = OTHER; note = 2'-O- methyl
  modified_base 18: mod_base = OTHER; note = 2'-O- methyl
  modified_base 19: mod_base = OTHER; note = 2'-O- methyl
  modified_base 20: mod_base = OTHER; note = 2'-O- methyl
  modified_base 21: mod_base = OTHER; note = 2'-O- methyl, 3'- thiophosphate
  modified_base 22: mod_base = OTHER; note = 2'-O- methyl, 3'- thiophosphate
  modified_base 23: mod_base = OTHER; note = 2'-O- methyl
taacacttttttgtttcacaaac

SEQ ID NO: 479 - RNA, 23 nt, synthetic construct
  source 1..23: mol_type = other RNA
  modified_base 1: mod_base = OTHER; note = 2'-O- methyl, 3'- thiophosphate, 5'-Ethenyl-(E)-phosphonate
  modified_base 2: mod_base = OTHER; note = 2'- fluoro, 3'- thiophosphate
  modified_base 3: mod_base = OTHER; note = 2'-O- methyl
  modified_base 4: mod_base = OTHER; note = 2'- fluoro
  modified_base 5: mod_base = OTHER; note = 2'- fluoro
  modified_base 6: mod_base = OTHER; note = 2'- fluoro
  modified_base 7: mod_base = OTHER; note = 2'-O- methyl
  modified_base 8: mod_base = OTHER; note = 2'-O- methyl
  modified_base 9: mod_base = OTHER; note = 2'-O- methyl
  modified_base 10: mod_base = OTHER; note = 2'-O- methyl
  modified_base 11: mod_base = OTHER; note = 2'-O- methyl
  modified_base 12: mod_base = OTHER; note = 2'-O- methyl
  modified_base 13: mod_base = OTHER; note = 2'-O- methyl
  modified_base 14: mod_base = OTHER; note = 2'- fluoro
  modified_base 15: mod_base = OTHER; note = 2'-O- methyl
  modified_base 16: mod_base = OTHER; note = 2'- fluoro
  modified_base 17: mod_base = OTHER; note = 2'-O- methyl
  modified_base 18: mod_base = OTHER; note = 2'-O- methyl
  modified_base 19: mod_base = OTHER; note = 2'-O- methyl
  modified_base 20: mod_base = OTHER; note = 2'-O- methyl
  modified_base 21: mod_base = OTHER; note = 2'-O- methyl, 3'- thiophosphate
  modified_base 22: mod_base = OTHER; note = 2'-O- methyl, 3'- thiophosphate
  modified_base 23: mod_base = OTHER; note = 2'-O- methyl
aagggaacacttttttgtttcac

SEQ ID NO: 480 - RNA, 23 nt, synthetic construct
  source 1..23: mol_type = other RNA
  modified_base 1: mod_base = OTHER; note = 2'-O- methyl, 3'- thiophosphate, 5'-Ethenyl-(E)-phosphonate
  modified_base 2: mod_base = OTHER; note = 2'- fluoro, 3'- thiophosphate
  modified_base 3: mod_base = OTHER; note = 2'- fluoro
  modified_base 4: mod_base = OTHER; note = 2'- fluoro
  modified_base 5: mod_base = OTHER; note = 2'-O- methyl
  modified_base 6: mod_base = OTHER; note = 2'- fluoro
  modified_base 7: mod_base = OTHER; note = 2'-O- methyl
  modified_base 8: mod_base = OTHER; note = 2'-O- methyl
  modified_base 9: mod_base = OTHER; note = 2'-O- methyl
  modified_base 10: mod_base = OTHER; note = 2'-O- methyl
  modified_base 11: mod_base = OTHER; note = 2'-O- methyl
  modified_base 12: mod_base = OTHER; note = 2'-O- methyl
  modified_base 13: mod_base = OTHER; note = 2'-O- methyl
  modified_base 14: mod_base = OTHER; note = 2'- fluoro
  modified_base 15: mod_base = OTHER; note = 2'-O- methyl
  modified_base 16: mod_base = OTHER; note = 2'- fluoro
  modified_base 17: mod_base = OTHER; note = 2'-O- methyl
  modified_base 18: mod_base = OTHER; note = 2'-O- methyl
  modified_base 19: mod_base = OTHER; note = 2'-O- methyl
  modified_base 20: mod_base = OTHER; note = 2'-O- methyl
  modified_base 21: mod_base = OTHER; note = 2'-O- methyl, 3'- thiophosphate
  modified_base 22: mod_base = OTHER; note = 2'-O- methyl, 3'- thiophosphate
  modified_base 23: mod_base = OTHER; note = 2'-O- methyl
aagggaacacttttttgtttcac

SEQ ID NO: 481 - RNA, 23 nt, synthetic construct
  source 1..23: mol_type = other RNA
  modified_base 1: mod_base = OTHER; note = 2'-O- methyl, 3'- thiophosphate, 5'-Ethenyl-(E)-phosphonate
  modified_base 2: mod_base = OTHER; note = 2'- fluoro, 3'- thiophosphate
  modified_base 3: mod_base = OTHER; note = 2'-O- methyl
  modified_base 4: mod_base = OTHER; note = 2'-O- methyl
  modified_base 5: mod_base = OTHER; note = 2'- fluoro
  modified_base 6: mod_base = OTHER; note = 2'- fluoro
  modified_base 7: mod_base = OTHER; note = 2'-O- methyl
  modified_base 8: mod_base = OTHER; note = 2'-O- methyl
  modified_base 9: mod_base = OTHER; note = 2'-O- methyl
  modified_base 10: mod_base = OTHER; note = 2'-O- methyl
  modified_base 11: mod_base = OTHER; note = 2'-O- methyl
  modified_base 12: mod_base = OTHER; note = 2'-O- methyl
  modified_base 13: mod_base = OTHER; note = 2'-O- methyl
  modified_base 14: mod_base = OTHER; note = 2'- fluoro
  modified_base 15: mod_base = OTHER; note = 2'-O- methyl
  modified_base 16: mod_base = OTHER; note = 2'- fluoro
  modified_base 17: mod_base = OTHER; note = 2'-O- methyl
  modified_base 18: mod_base = OTHER; note = 2'-O- methyl
  modified_base 19: mod_base = OTHER; note = 2'-O- methyl
  modified_base 20: mod_base = OTHER; note = 2'-O- methyl
  modified_base 21: mod_base = OTHER; note = 2'-O- methyl, 3'- thiophosphate
  modified_base 22: mod_base = OTHER; note = 2'-O- methyl, 3'- thiophosphate
  modified_base 23: mod_base = OTHER; note = 2'-O- methyl
aagggaacacttttttgtttcac

SEQ ID NO: 482 - RNA, 23 nt, synthetic construct
  source 1..23: mol_type = other RNA
  modified_base 1: mod_base = OTHER; note = 2'-O- methyl, 3'- thiophosphate, 5'-Ethenyl-(E)-phosphonate
  modified_base 2: mod_base = OTHER; note = 2'- fluoro, 3'- thiophosphate
  modified_base 3: mod_base = OTHER; note = 2'- fluoro
  modified_base 4: mod_base = OTHER; note = 2'-O- methyl
  modified_base 5: mod_base = OTHER; note = 2'-O- methyl
  modified_base 6: mod_base = OTHER; note = 2'- fluoro
  modified_base 7: mod_base = OTHER; note = 2'-O- methyl
  modified_base 8: mod_base = OTHER; note = 2'-O- methyl
  modified_base 9: mod_base = OTHER; note = 2'-O- methyl
  modified_base 10: mod_base = OTHER; note = 2'-O- methyl
  modified_base 11: mod_base = OTHER; note = 2'-O- methyl
  modified_base 12: mod_base = OTHER; note = 2'-O- methyl
  modified_base 13: mod_base = OTHER; note = 2'-O- methyl
  modified_base 14: mod_base = OTHER; note = 2'- fluoro
  modified_base 15: mod_base = OTHER; note = 2'-O- methyl
  modified_base 16: mod_base = OTHER; note = 2'- fluoro
  modified_base 17: mod_base = OTHER; note = 2'-O- methyl
  modified_base 18: mod_base = OTHER; note = 2'-O- methyl
  modified_base 19: mod_base = OTHER; note = 2'-O- methyl
  modified_base 20: mod_base = OTHER; note = 2'-O- methyl
  modified_base 21: mod_base = OTHER; note = 2'-O- methyl, 3'- thiophosphate
  modified_base 22: mod_base = OTHER; note = 2'-O- methyl, 3'- thiophosphate
  modified_base 23: mod_base = OTHER; note = 2'-O- methyl
aagggaacacttttttgtttcac

SEQ ID NO: 483 - RNA, 22 nt, synthetic construct
  source 1..22: mol_type = other RNA
  modified_base 1: mod_base = OTHER; note = 2'-O- methyl, 3'- thiophosphate, 5'-Ethenyl-(E)-phosphonate
  modified_base 2: mod_base = OTHER; note = 2'- fluoro, 3'- thiophosphate
  modified_base 3: mod_base = OTHER; note = 2'-O- methyl
  modified_base 4: mod_base = OTHER; note = 2'- fluoro
  modified_base 5: mod_base = OTHER; note = 2'- fluoro
  modified_base 6: mod_base = OTHER; note = 2'- fluoro
  modified_base 7: mod_base = OTHER; note = 2'-O- methyl
  modified_base 8: mod_base = OTHER; note = 2'-O- methyl
  modified_base 9: mod_base = OTHER; note = 2'-O- methyl
  modified_base 10: mod_base = OTHER; note = 2'-O- methyl
  modified_base 11: mod_base = OTHER; note = 2'-O- methyl
  modified_base 12: mod_base = OTHER; note = 2'-O- methyl
  modified_base 13: mod_base = OTHER; note = 2'-O- methyl
  modified_base 14: mod_base = OTHER; note = 2'- fluoro
  modified_base 15: mod_base = OTHER; note = 2'-O- methyl
  modified_base 16: mod_base = OTHER; note = 2'- fluoro
  modified_base 17: mod_base = OTHER; note = 2'-O- methyl
  modified_base 18: mod_base = OTHER; note = 2'-O- methyl
  modified_base 19: mod_base = OTHER; note = 2'-O- methyl
  modified_base 20: mod_base = OTHER; note = 2'-O- methyl, 3'- thiophosphate
  modified_base 21: mod_base = OTHER; note = 2'-O- methyl, 3'- thiophosphate
  modified_base 22: mod_base = OTHER; note = 2'-O- methyl
taaagtcgactcattagaagaa

SEQ ID NO: 484 - RNA, 22 nt, synthetic construct
  source 1..22: mol_type = other RNA
  modified_base 1: mod_base = OTHER; note = 2'-O- methyl, 3'- thiophosphate, 5'-Ethenyl-(E)-phosphonate
  modified_base 2: mod_base = OTHER; note = 2'- fluoro, 3'- thiophosphate
  modified_base 3: mod_base = OTHER; note = 2'- fluoro
  modified_base 4: mod_base = OTHER; note = 2'- fluoro
  modified_base 5: mod_base = OTHER; note = 2'-O- methyl
  modified_base 6: mod_base = OTHER; note = 2'- fluoro
  modified_base 7: mod_base = OTHER; note = 2'-O- methyl
  modified_base 8: mod_base = OTHER; note = 2'-O- methyl
  modified_base 9: mod_base = OTHER; note = 2'-O- methyl
  modified_base 10: mod_base = OTHER; note = 2'-O- methyl
  modified_base 11: mod_base = OTHER; note = 2'-O- methyl
  modified_base 12: mod_base = OTHER; note = 2'-O- methyl
  modified_base 13: mod_base = OTHER; note = 2'-O- methyl
  modified_base 14: mod_base = OTHER; note = 2'- fluoro
  modified_base 15: mod_base = OTHER; note = 2'-O- methyl
  modified_base 16: mod_base = OTHER; note = 2'- fluoro
  modified_base 17: mod_base = OTHER; note = 2'-O- methyl
  modified_base 18: mod_base = OTHER; note = 2'-O- methyl
  modified_base 19: mod_base = OTHER; note = 2'-O- methyl
  modified_base 20: mod_base = OTHER; note = 2'-O- methyl, 3'- thiophosphate
  modified_base 21: mod_base = OTHER; note = 2'-O- methyl, 3'- thiophosphate
  modified_base 22: mod_base = OTHER; note = 2'-O- methyl
taaagtcgactcattagaagaa

SEQ ID NO: 485 - RNA, 22 nt, synthetic construct
  source 1..22: mol_type = other RNA
  modified_base 1: mod_base = OTHER; note = 2'-O- methyl, 3'- thiophosphate, 5'-Ethenyl-(E)-phosphonate
  modified_base 2: mod_base = OTHER; note = 2'- fluoro, 3'- thiophosphate
  modified_base 3: mod_base = OTHER; note = 2'-O- methyl
  modified_base 4: mod_base = OTHER; note = 2'-O- methyl
  modified_base 5: mod_base = OTHER; note = 2'- fluoro
  modified_base 6: mod_base = OTHER; note = 2'- fluoro
  modified_base 7: mod_base = OTHER; note = 2'-O- methyl
  modified_base 8: mod_base = OTHER; note = 2'-O- methyl
  modified_base 9: mod_base = OTHER; note = 2'-O- methyl
  modified_base 10: mod_base = OTHER; note = 2'-O- methyl
  modified_base 11: mod_base = OTHER; note = 2'-O- methyl
  modified_base 12: mod_base = OTHER; note = 2'-O- methyl
  modified_base 13: mod_base = OTHER; note = 2'-O- methyl
  modified_base 14: mod_base = OTHER; note = 2'- fluoro
  modified_base 15: mod_base = OTHER; note = 2'-O- methyl
  modified_base 16: mod_base = OTHER; note = 2'- fluoro
  modified_base 17: mod_base = OTHER; note = 2'-O- methyl
  modified_base 18: mod_base = OTHER; note = 2'-O- methyl
  modified_base 19: mod_base = OTHER; note = 2'-O- methyl
  modified_base 20: mod_base = OTHER; note = 2'-O- methyl, 3'- thiophosphate
  modified_base 21: mod_base = OTHER; note = 2'-O- methyl, 3'- thiophosphate
  modified_base 22: mod_base = OTHER; note = 2'-O- methyl
taaagtcgactcattagaagaa

SEQ ID NO: 486 - RNA, 22 nt, synthetic construct
  source 1..22: mol_type = other RNA
  modified_base 1: mod_base = OTHER; note = 2'-O- methyl, 3'- thiophosphate, 5'-Ethenyl-(E)-phosphonate
  modified_base 2: mod_base = OTHER; note = 2'- fluoro, 3'- thiophosphate
  modified_base 3: mod_base = OTHER; note = 2'- fluoro
  modified_base 4: mod_base = OTHER; note = 2'-O- methyl
  modified_base 5: mod_base = OTHER; note = 2'-O- methyl
  modified_base 6: mod_base = OTHER; note = 2'- fluoro
  modified_base 7: mod_base = OTHER; note = 2'-O- methyl
  modified_base 8: mod_base = OTHER; note = 2'-O- methyl
  modified_base 9: mod_base = OTHER; note = 2'-O- methyl
  modified_base 10: mod_base = OTHER; note = 2'-O- methyl
  modified_base 11: mod_base = OTHER; note = 2'-O- methyl
  modified_base 12: mod_base = OTHER; note = 2'-O- methyl
  modified_base 13: mod_base = OTHER; note = 2'-O- methyl
  modified_base 14: mod_base = OTHER; note = 2'- fluoro
  modified_base 15: mod_base = OTHER; note = 2'-O- methyl
  modified_base 16: mod_base = OTHER; note = 2'- fluoro
  modified_base 17: mod_base = OTHER; note = 2'-O- methyl
  modified_base 18: mod_base = OTHER; note = 2'-O- methyl
  modified_base 19: mod_base = OTHER; note = 2'-O- methyl
  modified_base 20: mod_base = OTHER; note = 2'-O- methyl, 3'- thiophosphate
  modified_base 21: mod_base = OTHER; note = 2'-O- methyl, 3'- thiophosphate
  modified_base 22: mod_base = OTHER; note = 2'-O- methyl
taaagtcgactcattagaagaa

SEQ ID NO: 487 - RNA, 22 nt, synthetic construct
  source 1..22: mol_type = other RNA
  modified_base 1: mod_base = OTHER; note = 2'-O- methyl, 3'- thiophosphate
  modified_base 2: mod_base = OTHER; note = 2'- fluoro, 3'- thiophosphate
  modified_base 3: mod_base = OTHER; note = 2'-O- methyl
  modified_base 4: mod_base = OTHER; note = 2'-O- methyl
  modified_base 5: mod_base = OTHER; note = 2'-O- methyl
  modified_base 6: mod_base = OTHER; note = 2'- fluoro
  modified_base 7: mod_base = OTHER; note = 2'-O- methyl
  modified_base 8: mod_base = OTHER; note = 2'-O- methyl
  modified_base 9: mod_base = OTHER; note = 2'-O- methyl
  modified_base 10: mod_base = OTHER; note = 2'-O- methyl
  modified_base 11: mod_base = OTHER; note = 2'-O- methyl
  modified_base 12: mod_base = OTHER; note = 2'-O- methyl
  modified_base 13: mod_base = OTHER; note = 2'-O- methyl
  modified_base 14: mod_base = OTHER; note = 2'- fluoro
  modified_base 15: mod_base = OTHER; note = 2'-O- methyl
  modified_base 16: mod_base = OTHER; note = 2'- fluoro
  modified_base 17: mod_base = OTHER; note = 2'-O- methyl
  modified_base 18: mod_base = OTHER; note = 2'-O- methyl
  modified_base 19: mod_base = OTHER; note = 2'-O- methyl
  modified_base 20: mod_base = OTHER; note = 2'-O- methyl, 3'- thiophosphate
  modified_base 21: mod_base = OTHER; note = 2'-O- methyl, 3'- thiophosphate
  modified_base 22: mod_base = OTHER; note = 2'-O- methyl
taaagtcgactcattagaagaa

SEQ ID NO: 488 - RNA, 22 nt, synthetic construct
  source 1..22: mol_type = other RNA
  modified_base 1: mod_base = OTHER; note = 2'-O- methyl, 3'- thiophosphate, 5'-Ethenyl-(E)-phosphonate
  modified_base 2: mod_base = OTHER; note = 2'- fluoro, 3'- thiophosphate
  modified_base 3: mod_base = OTHER; note = 2'-O- methyl
  modified_base 4: mod_base = OTHER; note = 2'- fluoro
  modified_base 5: mod_base = OTHER; note = 2'- fluoro
  modified_base 6: mod_base = OTHER; note = 2'- fluoro
  modified_base 7: mod_base = OTHER; note = 2'-O- methyl
  modified_base 8: mod_base = OTHER; note = 2'-O- methyl
  modified_base 9: mod_base = OTHER; note = 2'-O- methyl
  modified_base 10: mod_base = OTHER; note = 2'-O- methyl
  modified_base 11: mod_base = OTHER; note = 2'-O- methyl
  modified_base 12: mod_base = OTHER; note = 2'-O- methyl
  modified_base 13: mod_base = OTHER; note = 2'-O- methyl
  modified_base 14: mod_base = OTHER; note = 2'- fluoro
  modified_base 15: mod_base = OTHER; note = 2'-O- methyl
  modified_base 16: mod_base = OTHER; note = 2'- fluoro
  modified_base 17: mod_base = OTHER; note = 2'-O- methyl
  modified_base 18: mod_base = OTHER; note = 2'-O- methyl
  modified_base 19: mod_base = OTHER; note = 2'-O- methyl
  modified_base 20: mod_base = OTHER; note = 2'-O- methyl, 3'- thiophosphate
  modified_base 21: mod_base = OTHER; note = 2'-O- methyl, 3'- thiophosphate
  modified_base 22: mod_base = OTHER; note = 2'-O- methyl
ttcattagaagaaaaggtggga

SEQ ID NO: 489 - RNA, 22 nt, synthetic construct
  source 1..22: mol_type = other RNA
  modified_base 1: mod_base = OTHER; note = 2'-O- methyl, 3'- thiophosphate, 5'-Ethenyl-(E)-phosphonate
  modified_base 2: mod_base = OTHER; note = 2'- fluoro, 3'- thiophosphate
  modified_base 3: mod_base = OTHER; note = 2'- fluoro
  modified_base 4: mod_base = OTHER; note = 2'- fluoro
  modified_base 5: mod_base = OTHER; note = 2'-O- methyl
  modified_base 6: mod_base = OTHER; note = 2'- fluoro
  modified_base 7: mod_base = OTHER; note = 2'-O- methyl
  modified_base 8: mod_base = OTHER; note = 2'-O- methyl
  modified_base 9: mod_base = OTHER; note = 2'-O- methyl
  modified_base 10: mod_base = OTHER; note = 2'-O- methyl
  modified_base 11: mod_base = OTHER; note = 2'-O- methyl
  modified_base 12: mod_base = OTHER; note = 2'-O- methyl
  modified_base 13: mod_base = OTHER; note = 2'-O- methyl
  modified_base 14: mod_base = OTHER; note = 2'- fluoro
  modified_base 15: mod_base = OTHER; note = 2'-O- methyl
  modified_base 16: mod_base = OTHER; note = 2'- fluoro
  modified_base 17: mod_base = OTHER; note = 2'-O- methyl
  modified_base 18: mod_base = OTHER; note = 2'-O- methyl
  modified_base 19: mod_base = OTHER; note = 2'-O- methyl
  modified_base 20: mod_base = OTHER; note = 2'-O- methyl, 3'- thiophosphate
  modified_base 21: mod_base = OTHER; note = 2'-O- methyl, 3'- thiophosphate
  modified_base 22: mod_base = OTHER; note = 2'-O- methyl
ttcattagaagaaaaggtggga

SEQ ID NO: 490 - RNA, 22 nt, synthetic construct
  source 1..22: mol_type = other RNA
  modified_base 1: mod_base = OTHER; note = 2'-O- methyl, 3'- thiophosphate, 5'-Ethenyl-(E)-phosphonate
  modified_base 2: mod_base = OTHER; note = 2'- fluoro, 3'- thiophosphate
  modified_base 3: mod_base = OTHER; note = 2'-O- methyl
  modified_base 4: mod_base = OTHER; note = 2'-O- methyl
  modified_base 5: mod_base = OTHER; note = 2'-O- methyl
  modified_base 6: mod_base = OTHER; note = 2'- fluoro
  modified_base 7: mod_base = OTHER; note = 2'-O- methyl
  modified_base 8: mod_base = OTHER; note = 2'-O- methyl
  modified_base 9: mod_base = OTHER; note = 2'-O- methyl
  modified_base 10: mod_base = OTHER; note = 2'-O- methyl
  modified_base 11: mod_base = OTHER; note = 2'-O- methyl
  modified_base 12: mod_base = OTHER; note = 2'-O- methyl
  modified_base 13: mod_base = OTHER; note = 2'-O- methyl
  modified_base 14: mod_base = OTHER; note = 2'- fluoro
  modified_base 15: mod_base = OTHER; note = 2'-O- methyl
  modified_base 16: mod_base = OTHER; note = 2'- fluoro
  modified_base 17: mod_base = OTHER; note = 2'-O- methyl
  modified_base 18: mod_base = OTHER; note = 2'-O- methyl
  modified_base 19: mod_base = OTHER; note = 2'-O- methyl
  modified_base 20: mod_base = OTHER; note = 2'-O- methyl, 3'- thiophosphate
  modified_base 21: mod_base = OTHER; note = 2'-O- methyl, 3'- thiophosphate
  modified_base 22: mod_base = OTHER; note = 2'-O- methyl
ttcattagaagaaaaggtggga

SEQ ID NO: 491 - RNA, 22 nt, synthetic construct
  source 1..22: mol_type = other RNA
  modified_base 1: mod_base = OTHER; note = 2'-O- methyl, 3'- thiophosphate
  modified_base 2: mod_base = OTHER; note = 2'- fluoro, 3'- thiophosphate
  modified_base 3: mod_base = OTHER; note = 2'-O- methyl
  modified_base 4: mod_base = OTHER; note = 2'-O- methyl
  modified_base 5: mod_base = OTHER; note = 2'-O- methyl
  modified_base 6: mod_base = OTHER; note = 2'- fluoro
  modified_base 7: mod_base = OTHER; note = 2'-O- methyl
  modified_base 8: mod_base = OTHER; note = 2'-O- methyl
  modified_base 9: mod_base = OTHER; note = 2'-O- methyl
  modified_base 10: mod_base = OTHER; note = 2'-O- methyl
  modified_base 11: mod_base = OTHER; note = 2'-O- methyl
  modified_base 12: mod_base = OTHER; note = 2'-O- methyl
  modified_base 13: mod_base = OTHER; note = 2'-O- methyl
  modified_base 14: mod_base = OTHER; note = 2'- fluoro
  modified_base 15: mod_base = OTHER; note = 2'-O- methyl
  modified_base 16: mod_base = OTHER; note = 2'- fluoro
  modified_base 17: mod_base = OTHER; note = 2'-O- methyl
  modified_base 18: mod_base = OTHER; note = 2'-O- methyl
  modified_base 19: mod_base = OTHER; note = 2'-O- methyl
  modified_base 20: mod_base = OTHER; note = 2'-O- methyl, 3'- thiophosphate
  modified_base 21: mod_base = OTHER; note = 2'-O- methyl, 3'- thiophosphate
  modified_base 22: mod_base = OTHER; note = 2'-O- methyl
ttcattagaagaaaaggtggga

SEQ ID NO: 492 - RNA, 22 nt, synthetic construct
  source 1..22: mol_type = other RNA
  modified_base 1: mod_base = OTHER; note = 2'-O- methyl, 3'- thiophosphate, 5'-Ethenyl-(E)-phosphonate
  modified_base 2: mod_base = OTHER; note = 2'- fluoro, 3'- thiophosphate
  modified_base 3: mod_base = OTHER; note = 2'-O- methyl
  modified_base 4: mod_base = OTHER; note = 2'- fluoro
  modified_base 5: mod_base = OTHER; note = 2'- fluoro
  modified_base 6: mod_base = OTHER; note = 2'- fluoro
  modified_base 7: mod_base = OTHER; note = 2'-O- methyl
  modified_base 8: mod_base = OTHER; note = 2'-O- methyl
  modified_base 9: mod_base = OTHER; note = 2'-O- methyl
  modified_base 10: mod_base = OTHER; note = 2'-O- methyl
  modified_base 11: mod_base = OTHER; note = 2'-O- methyl
  modified_base 12: mod_base = OTHER; note = 2'-O- methyl
  modified_base 13: mod_base = OTHER; note = 2'-O- methyl
  modified_base 14: mod_base = OTHER; note = 2'- fluoro
  modified_base 15: mod_base = OTHER; note = 2'-O- methyl
  modified_base 16: mod_base = OTHER; note = 2'- fluoro
  modified_base 17: mod_base = OTHER; note = 2'-O- methyl
  modified_base 18: mod_base = OTHER; note = 2'-O- methyl
  modified_base 19: mod_base = OTHER; note = 2'-O- methyl
  modified_base 20: mod_base = OTHER; note = 2'-O- methyl, 3'- thiophosphate
  modified_base 21: mod_base = OTHER; note = 2'-O- methyl, 3'- thiophosphate
  modified_base 22: mod_base = OTHER; note = 2'-O- methyl
tactcattagaagaaaaggtgg

SEQ ID NO: 493 - RNA, 22 nt, synthetic construct
  source 1..22: mol_type = other RNA
  modified_base 1: mod_base = OTHER; note = 2'-O- methyl, 3'- thiophosphate, 5'-Ethenyl-(E)-phosphonate
  modified_base 2: mod_base = OTHER; note = 2'- fluoro, 3'- thiophosphate
  modified_base 3: mod_base = OTHER; note = 2'- fluoro
  modified_base 4: mod_base = OTHER; note = 2'- fluoro
  modified_base 5: mod_base = OTHER; note = 2'-O- methyl
  modified_base 6: mod_base = OTHER; note = 2'- fluoro
  modified_base 7: mod_base = OTHER; note = 2'-O- methyl
  modified_base 8: mod_base = OTHER; note = 2'-O- methyl
  modified_base 9: mod_base = OTHER; note = 2'-O- methyl
  modified_base 10: mod_base = OTHER; note = 2'-O- methyl
  modified_base 11: mod_base = OTHER; note = 2'-O- methyl
  modified_base 12: mod_base = OTHER; note = 2'-O- methyl
  modified_base 13: mod_base = OTHER; note = 2'-O- methyl
  modified_base 14: mod_base = OTHER; note = 2'- fluoro
  modified_base 15: mod_base = OTHER; note = 2'-O- methyl
  modified_base 16: mod_base = OTHER; note = 2'- fluoro
  modified_base 17: mod_base = OTHER; note = 2'-O- methyl
  modified_base 18: mod_base = OTHER; note = 2'-O- methyl
  modified_base 19: mod_base = OTHER; note = 2'-O- methyl
  modified_base 20: mod_base = OTHER; note = 2'-O- methyl, 3'- thiophosphate
  modified_base 21: mod_base = OTHER; note = 2'-O- methyl, 3'- thiophosphate
  modified_base 22: mod_base = OTHER; note = 2'-O- methyl
tactcattagaagaaaaggtgg

SEQ ID NO: 494 - RNA, 22 nt, synthetic construct
  source 1..22: mol_type = other RNA
  modified_base 1: mod_base = OTHER; note = 2'-O- methyl, 3'- thiophosphate, 5'-Ethenyl-(E)-phosphonate
  modified_base 2: mod_base = OTHER; note = 2'- fluoro, 3'- thiophosphate
  modified_base 3: mod_base = OTHER; note = 2'-O- methyl
  modified_base 4: mod_base = OTHER; note = 2'-O- methyl
  modified_base 5: mod_base = OTHER; note = 2'-O- methyl
  modified_base 6: mod_base = OTHER; note = 2'- fluoro
  modified_base 7: mod_base = OTHER; note = 2'-O- methyl
  modified_base 8: mod_base = OTHER; note = 2'-O- methyl
  modified_base 9: mod_base = OTHER; note = 2'-O- methyl
  modified_base 10: mod_base = OTHER; note = 2'-O- methyl
  modified_base 11: mod_base = OTHER; note = 2'-O- methyl
  modified_base 12: mod_base = OTHER; note = 2'-O- methyl
  modified_base 13: mod_base = OTHER; note = 2'-O- methyl
  modified_base 14: mod_base = OTHER; note = 2'- fluoro
  modified_base 15: mod_base = OTHER; note = 2'-O- methyl
  modified_base 16: mod_base = OTHER; note = 2'- fluoro
  modified_base 17: mod_base = OTHER; note = 2'-O- methyl
  modified_base 18: mod_base = OTHER; note = 2'-O- methyl
  modified_base 19: mod_base = OTHER; note = 2'-O- methyl
  modified_base 20: mod_base = OTHER; note = 2'-O- methyl, 3'- thiophosphate
  modified_base 21: mod_base = OTHER; note = 2'-O- methyl, 3'- thiophosphate
  modified_base 22: mod_base = OTHER; note = 2'-O- methyl
tactcattagaagaaaaggtgg

SEQ ID NO: 495 - RNA, 22 nt, synthetic construct
  source 1..22: mol_type = other RNA
  modified_base 1: mod_base = OTHER; note = 2'-O- methyl, 3'- thiophosphate
  modified_base 2: mod_base = OTHER; note = 2'- fluoro, 3'- thiophosphate
  modified_base 3: mod_base = OTHER; note = 2'-O- methyl
  modified_base 4: mod_base = OTHER; note = 2'-O- methyl
  modified_base 5: mod_base = OTHER; note = 2'-O- methyl
  modified_base 6: mod_base = OTHER; note = 2'- fluoro
  modified_base 7: mod_base = OTHER; note = 2'-O- methyl
  modified_base 8: mod_base = OTHER; note = 2'-O- methyl
  modified_base 9: mod_base = OTHER; note = 2'-O- methyl
  modified_base 10: mod_base = OTHER; note = 2'-O- methyl
  modified_base 11: mod_base = OTHER; note = 2'-O- methyl
  modified_base 12: mod_base = OTHER; note = 2'-O- methyl
  modified_base 13: mod_base = OTHER; note = 2'-O- methyl
  modified_base 14: mod_base = OTHER; note = 2'- fluoro
  modified_base 15: mod_base = OTHER; note = 2'-O- methyl
  modified_base 16: mod_base = OTHER; note = 2'- fluoro
  modified_base 17: mod_base = OTHER; note = 2'-O- methyl
  modified_base 18: mod_base = OTHER; note = 2'-O- methyl
  modified_base 19: mod_base = OTHER; note = 2'-O- methyl
  modified_base 20: mod_base = OTHER; note = 2'-O- methyl, 3'- thiophosphate
  modified_base 21: mod_base = OTHER; note = 2'-O- methyl, 3'- thiophosphate
  modified_base 22: mod_base = OTHER; note = 2'-O- methyl
tactcattagaagaaaaggtgg

SEQ ID NO: 496 - RNA, 23 nt, synthetic construct
  source 1..23: mol_type = other RNA
  modified_base 1: mod_base = OTHER; note = 2'-O- methyl, 3'- thiophosphate, 5'-Ethenyl-(E)-phosphonate
  modified_base 2: mod_base = OTHER; note = 2'- fluoro, 3'- thiophosphate
  modified_base 3: mod_base = OTHER; note = 2'-O- methyl
  modified_base 4: mod_base = OTHER; note = 2'- fluoro
  modified_base 5: mod_base = OTHER; note = 2'- fluoro
  modified_base 6: mod_base = OTHER; note = 2'- fluoro
  modified_base 7: mod_base = OTHER; note = 2'-O- methyl
  modified_base 8: mod_base = OTHER; note = 2'-O- methyl
  modified_base 9: mod_base = OTHER; note = 2'-O- methyl
  modified_base 10: mod_base = OTHER; note = 2'-O- methyl
  modified_base 11: mod_base = OTHER; note = 2'-O- methyl
  modified_base 12: mod_base = OTHER; note = 2'-O- methyl
  modified_base 13: mod_base = OTHER; note = 2'-O- methyl
  modified_base 14: mod_base = OTHER; note = 2'- fluoro
  modified_base 15: mod_base = OTHER; note = 2'-O- methyl
  modified_base 16: mod_base = OTHER; note = 2'- fluoro
  modified_base 17: mod_base = OTHER; note = 2'-O- methyl
  modified_base 18: mod_base = OTHER; note = 2'-O- methyl
  modified_base 19: mod_base = OTHER; note = 2'-O- methyl
  modified_base 20: mod_base = OTHER; note = 2'-O- methyl
  modified_base 21: mod_base = OTHER; note = 2'-O- methyl, 3'- thiophosphate
  modified_base 22: mod_base = OTHER; note = 2'-O- methyl, 3'- thiophosphate
  modified_base 23: mod_base = OTHER; note = 2'-O- methyl
ttatactttaattttaaaaccca

SEQ ID NO: 497 - RNA, 23 nt, synthetic construct
  source 1..23: mol_type = other RNA
  modified_base 1: mod_base = OTHER; note = 2'-O- methyl, 3'- thiophosphate, 5'-Ethenyl-(E)-phosphonate
  modified_base 2: mod_base = OTHER; note = 2'- fluoro, 3'- thiophosphate
  modified_base 3: mod_base = OTHER; note = 2'- fluoro
  modified_base 4: mod_base = OTHER; note = 2'- fluoro
  modified_base 5: mod_base = OTHER; note = 2'-O- methyl
  modified_base 6: mod_base = OTHER; note = 2'- fluoro
  modified_base 7: mod_base = OTHER; note = 2'-O- methyl
  modified_base 8: mod_base = OTHER; note = 2'-O- methyl
  modified_base 9: mod_base = OTHER; note = 2'-O- methyl
  modified_base 10: mod_base = OTHER; note = 2'-O- methyl
  modified_base 11: mod_base = OTHER; note = 2'-O- methyl
  modified_base 12: mod_base = OTHER; note = 2'-O- methyl
  modified_base 13: mod_base = OTHER; note = 2'-O- methyl
  modified_base 14: mod_base = OTHER; note = 2'- fluoro
  modified_base 15: mod_base = OTHER; note = 2'-O- methyl
  modified_base 16: mod_base = OTHER; note = 2'- fluoro
  modified_base 17: mod_base = OTHER; note = 2'-O- methyl
  modified_base 18: mod_base = OTHER; note = 2'-O- methyl
  modified_base 19: mod_base = OTHER; note = 2'-O- methyl
  modified_base 20: mod_base = OTHER; note = 2'-O- methyl
  modified_base 21: mod_base = OTHER; note = 2'-O- methyl, 3'- thiophosphate
  modified_base 22: mod_base = OTHER; note = 2'-O- methyl, 3'- thiophosphate
  modified_base 23: mod_base = OTHER; note = 2'-O- methyl
ttatactttaattttaaaaccca

SEQ ID NO: 498 - RNA, 23 nt, synthetic construct
  source 1..23: mol_type = other RNA
  modified_base 1: mod_base = OTHER; note = 2'-O- methyl, 3'- thiophosphate, 5'-Ethenyl-(E)-phosphonate
  modified_base 2: mod_base = OTHER; note = 2'- fluoro, 3'- thiophosphate
  modified_base 3: mod_base = OTHER; note = 2'-O- methyl
  modified_base 4: mod_base = OTHER; note = 2'-O- methyl
  modified_base 5: mod_base = OTHER; note = 2'-O- methyl
  modified_base 6: mod_base = OTHER; note = 2'- fluoro
  modified_base 7: mod_base = OTHER; note = 2'-O- methyl
  modified_base 8: mod_base = OTHER; note = 2'-O- methyl
  modified_base 9: mod_base = OTHER; note = 2'-O- methyl
  modified_base 10: mod_base = OTHER; note = 2'-O- methyl
  modified_base 11: mod_base = OTHER; note = 2'-O- methyl
  modified_base 12: mod_base = OTHER; note = 2'-O- methyl
  modified_base 13: mod_base = OTHER; note = 2'-O- methyl
  modified_base 14: mod_base = OTHER; note = 2'- fluoro
  modified_base 15: mod_base = OTHER; note = 2'-O- methyl
  modified_base 16: mod_base = OTHER; note = 2'- fluoro
  modified_base 17: mod_base = OTHER; note = 2'-O- methyl
  modified_base 18: mod_base = OTHER; note = 2'-O- methyl
  modified_base 19: mod_base = OTHER; note = 2'-O- methyl
  modified_base 20: mod_base = OTHER; note = 2'-O- methyl
  modified_base 21: mod_base = OTHER; note = 2'-O- methyl, 3'- thiophosphate
  modified_base 22: mod_base = OTHER; note = 2'-O- methyl, 3'- thiophosphate
  modified_base 23: mod_base = OTHER; note = 2'-O- methyl
ttatactttaattttaaaaccca

SEQ ID NO: 499 - RNA, 23 nt, synthetic construct
  source 1..23: mol_type = other RNA
  modified_base 1: mod_base = OTHER; note = 2'-O- methyl, 3'- thiophosphate
  modified_base 2: mod_base = OTHER; note = 2'- fluoro, 3'- thiophosphate
  modified_base 3: mod_base = OTHER; note = 2'-O- methyl
  modified_base 4: mod_base = OTHER; note = 2'-O- methyl
  modified_base 5: mod_base = OTHER; note = 2'-O- methyl
  modified_base 6: mod_base = OTHER; note = 2'- fluoro
  modified_base 7: mod_base = OTHER; note = 2'-O- methyl
  modified_base 8: mod_base = OTHER; note = 2'-O- methyl
  modified_base 9: mod_base = OTHER; note = 2'-O- methyl
  modified_base 10: mod_base = OTHER; note = 2'-O- methyl
  modified_base 11: mod_base = OTHER; note = 2'-O- methyl
  modified_base 12: mod_base = OTHER; note = 2'-O- methyl
  modified_base 13: mod_base = OTHER; note = 2'-O- methyl
  modified_base 14: mod_base = OTHER; note = 2'- fluoro
  modified_base 15: mod_base = OTHER; note = 2'-O- methyl
  modified_base 16: mod_base = OTHER; note = 2'- fluoro
  modified_base 17: mod_base = OTHER; note = 2'-O- methyl
  modified_base 18: mod_base = OTHER; note = 2'-O- methyl
  modified_base 19: mod_base = OTHER; note = 2'-O- methyl
  modified_base 20: mod_base = OTHER; note = 2'-O- methyl
  modified_base 21: mod_base = OTHER; note = 2'-O- methyl, 3'- thiophosphate
  modified_base 22: mod_base = OTHER; note = 2'-O- methyl, 3'- thiophosphate
  modified_base 23: mod_base = OTHER; note = 2'-O- methyl
ttatactttaattttaaaaccca

SEQ ID NO: 500 - RNA, 21 nt, synthetic construct
  source 1..21: mol_type = other RNA
accttttcttctaatgagtct

SEQ ID NO: 501 - RNA, 20 nt, synthetic construct
  source 1..20: mol_type = other RNA
tttgtgaaacaaaaaagtga

SEQ ID NO: 502 - RNA, 22 nt, synthetic construct
  source 1..22: mol_type = other RNA
ttgttctcaacttgaaaaggga

SEQ ID NO: 503 - RNA, 21 nt, synthetic construct
  source 1..21: mol_type = other RNA
ccaccttttcttctaatgagt

SEQ ID NO: 504 - RNA, 21 nt, synthetic construct
  source 1..21: mol_type = other RNA
caccttttcttctaatgagta

SEQ ID NO: 505 - RNA, 19 nt, synthetic construct
  source 1..19: mol_type = other RNA
ttctaatgagtcgacttta

SEQ ID NO: 506 - RNA, 21 nt, synthetic construct
  source 1..21: mol_type = other RNA
agaacaaaaattgggttttaa

SEQ ID NO: 507 - RNA, 21 nt, synthetic construct
  source 1..21: mol_type = other RNA
gtcatccacaatgagagtaca

SEQ ID NO: 508 - RNA, 20 nt, synthetic construct
  source 1..20: mol_type = other RNA
tcaagttgagaacaaaaata

SEQ ID NO: 509 - RNA, 21 nt, synthetic construct
  source 1..21: mol_type = other RNA
gggttttaaaattaaagtata

SEQ ID NO: 510 - RNA, 21 nt, synthetic construct
  source 1..21: mol_type = other RNA
ggttttaaaattaaagtatac

SEQ ID NO: 511 - RNA, 21 nt, synthetic construct
  source 1..21: mol_type = other RNA
gttttaaaattaaagtataca

SEQ ID NO: 512 - RNA, 21 nt, synthetic construct
  source 1..21: mol_type = other RNA
ttgtgaaacaaaaaagtgttt

SEQ ID NO: 513 - RNA, 23 nt, synthetic construct
  source 1..23: mol_type = other RNA
agactcattagaagaaaaggtgg

SEQ ID NO: 514 - RNA, 22 nt, synthetic construct
  source 1..22: mol_type = other RNA
tcacttttttgtttcacaaaca

SEQ ID NO: 515 - RNA, 20 nt, synthetic construct
  source 1..20: mol_type = other RNA
ccttttcaagttgagaacaa

SEQ ID NO: 516 - RNA, 23 nt, synthetic construct
  source 1..23: mol_type = other RNA
actcattagaagaaaaggtggga

SEQ ID NO: 517 - RNA, 23 nt, synthetic construct
  source 1..23: mol_type = other RNA
tactcattagaagaaaaggtggg

SEQ ID NO: 518 - RNA, 19 nt, synthetic construct
  source 1..19: mol_type = other RNA
taaagtcgactcattagaa

SEQ ID NO: 519 - RNA, 23 nt, synthetic construct
  source 1..23: mol_type = other RNA
ttaaaacccaatttttgttctca

SEQ ID NO: 520 - RNA, 23 nt, synthetic construct
  source 1..23: mol_type = other RNA
tgtactctcattgtggatgacga

SEQ ID NO: 521 - RNA, 22 nt, synthetic construct
  source 1..22: mol_type = other RNA
tatttttgttctcaacttgaaa

SEQ ID NO: 522 - RNA, 21 nt, synthetic construct
  source 1..21: mol_type = other RNA
tactttaattttaaaacccaa

SEQ ID NO: 523 - RNA, 21 nt, synthetic construct
  source 1..21: mol_type = other RNA
atactttaattttaaaaccca

SEQ ID NO: 524 - RNA, 21 nt, synthetic construct
  source 1..21: mol_type = other RNA
tatactttaattttaaaaccc

SEQ ID NO: 525 - RNA, 21 nt, synthetic construct
  source 1..21: mol_type = other RNA
acacttttttgtttcacaatt

SEQ ID NO: 526 - RNA, 21 nt, synthetic construct
  source 1..21: mol_type = other RNA
  modified_base 1: mod_base = OTHER; note = 2'-O- methyl, 3'- thiophosphate
  modified_base 2: mod_base = OTHER; note = 2'-O- methyl, 3'- thiophosphate
  modified_base 3: mod_base = OTHER; note = 2'-O- methyl
  modified_base 4: mod_base = OTHER; note = 2'-O- methyl
  modified_base 5: mod_base = OTHER; note = 2'-O- methyl
  modified_base 6: mod_base = OTHER; note = 2'-O- methyl
  modified_base 7: mod_base = OTHER; note = 2'- fluoro
  modified_base 8: mod_base = OTHER; note = 2'-O- methyl
  modified_base 9: mod_base = OTHER; note = 2'- fluoro
  modified_base 10: mod_base = OTHER; note = 2'- fluoro
  modified_base 11: mod_base = OTHER; note = 2'- fluoro
  modified_base 12: mod_base = OTHER; note = 2'-O- methyl
  modified_base 13: mod_base = OTHER; note = 2'-O- methyl
  modified_base 14: mod_base = OTHER; note = 2'-O- methyl
  modified_base 16: mod_base = OTHER; note = 2'-O- methyl
  modified_base 17: mod_base = OTHER; note = 2'- fluoro
  modified_base 18: mod_base = OTHER; note = 2'-O- methyl
  modified_base 19: mod_base = OTHER; note = 2'-O- methyl
  modified_base 20: mod_base = OTHER; note = 2'-O- methyl
  modified_base 21: mod_base = OTHER; note = 2'-O- methyl
ttgggttttaaaattaaagta

SEQ ID NO: 527 - RNA, 21 nt, synthetic construct
  source 1..21: mol_type = other RNA
  modified_base 1: mod_base = OTHER; note = 2'-O- methyl, 3'- thiophosphate
  modified_base 2: mod_base = OTHER; note = 2'-O- methyl, 3'- thiophosphate
  modified_base 3: mod_base = OTHER; note = 2'-O- methyl
  modified_base 4: mod_base = OTHER; note = 2'-O- methyl
  modified_base 5: mod_base = OTHER; note = 2'-O- methyl
  modified_base 6: mod_base = OTHER; note = 2'-O- methyl
  modified_base 7: mod_base = OTHER; note = 2'- fluoro
  modified_base 8: mod_base = OTHER; note = 2'-O- methyl
  modified_base 9: mod_base = OTHER; note = 2'- fluoro
  modified_base 10: mod_base = OTHER; note = 2'- fluoro
  modified_base 11: mod_base = OTHER; note = 2'- fluoro
  modified_base 12: mod_base = OTHER; note = 2'-O- methyl
  modified_base 13: mod_base = OTHER; note = 2'-O- methyl
  modified_base 14: mod_base = OTHER; note = 2'-O- methyl
  modified_base 17: mod_base = OTHER; note = 2'- fluoro
  modified_base 18: mod_base = OTHER; note = 2'-O- methyl
  modified_base 19: mod_base = OTHER; note = 2'-O- methyl
  modified_base 20: mod_base = OTHER; note = 2'-O- methyl
  modified_base 21: mod_base = OTHER; note = 2'-O- methyl
ttgggttttaaaattaaagta

SEQ ID NO: 528 - RNA, 20 nt, synthetic construct
  source 1..20: mol_type = other RNA
  modified_base 1: mod_base = OTHER; note = 2'-O- methyl, 3'- thiophosphate
  modified_base 2: mod_base = OTHER; note = 2'-O- methyl, 3'- thiophosphate
  modified_base 3: mod_base = OTHER; note = 2'-O- methyl
  modified_base 4: mod_base = OTHER; note = 2'-O- methyl
  modified_base 5: mod_base = OTHER; note = 2'-O- methyl
  modified_base 6: mod_base = OTHER; note = 2'- fluoro
  modified_base 7: mod_base = OTHER; note = 2'-O- methyl
  modified_base 8: mod_base = OTHER; note = 2'- fluoro
  modified_base 9: mod_base = OTHER; note = 2'-O- methyl
  modified_base 10: mod_base = OTHER; note = 2'- fluoro
  modified_base 11: mod_base = OTHER; note = 2'-O- methyl
  modified_base 12: mod_base = OTHER; note = 2'-O- methyl
  modified_base 13: mod_base = OTHER; note = 2'-O- methyl
  modified_base 16: mod_base = OTHER; note = 2'- fluoro
  modified_base 17: mod_base = OTHER; note = 2'-O- methyl
  modified_base 18: mod_base = OTHER; note = 2'-O- methyl
  modified_base 19: mod_base = OTHER; note = 2'-O- methyl
  modified_base 20: mod_base = OTHER; note = 2'-O- methyl
accttttcttctaatgagta

SEQ ID NO: 529 - RNA, 20 nt, synthetic construct
  source 1..20: mol_type = other RNA
  modified_base 1: mod_base = OTHER; note = 2'-O- methyl, 3'- thiophosphate
  modified_base 2: mod_base = OTHER; note = 2'-O- methyl, 3'- thiophosphate
  modified_base 3: mod_base = OTHER; note = 2'-O- methyl
  modified_base 4: mod_base = OTHER; note = 2'-O- methyl
  modified_base 5: mod_base = OTHER; note = 2'-O- methyl
  modified_base 6: mod_base = OTHER; note = 2'- fluoro
  modified_base 7: mod_base = OTHER; note = 2'-O- methyl
  modified_base 8: mod_base = OTHER; note = 2'- fluoro
  modified_base 9: mod_base = OTHER; note = 2'-O- methyl
  modified_base 10: mod_base = OTHER; note = 2'- fluoro
  modified_base 11: mod_base = OTHER; note = 2'-O- methyl
  modified_base 12: mod_base = OTHER; note = 2'-O- methyl
  modified_base 13: mod_base = OTHER; note = 2'-O- methyl
  modified_base 15: mod_base = OTHER; note = 2'-O- methyl
  modified_base 16: mod_base = OTHER; note = 2'- fluoro
  modified_base 17: mod_base = OTHER; note = 2'-O- methyl
  modified_base 18: mod_base = OTHER; note = 2'-O- methyl
  modified_base 19: mod_base = OTHER; note = 2'-O- methyl
  modified_base 20: mod_base = OTHER; note = 2'-O- methyl
accttttcttctaatgagta

SEQ ID NO: 530 - RNA, 21 nt, synthetic construct
  source 1..21: mol_type = other RNA
  modified_base 1: mod_base = OTHER; note = 2'-O- methyl, 3'- thiophosphate
  modified_base 2: mod_base = OTHER; note = 2'-O- methyl, 3'- thiophosphate
  modified_base 3: mod_base = OTHER; note = 2'-O- methyl
  modified_base 4: mod_base = OTHER; note = 2'-O- methyl
  modified_base 5: mod_base = OTHER; note = 2'-O- methyl
  modified_base 6: mod_base = OTHER; note = 2'-O- methyl
  modified_base 7: mod_base = OTHER; note = 2'- fluoro
  modified_base 8: mod_base = OTHER; note = 2'-O- methyl
  modified_base 9: mod_base = OTHER; note = 2'- fluoro
  modified_base 10: mod_base = OTHER; note = 2'- fluoro
  modified_base 11: mod_base = OTHER; note = 2'- fluoro
  modified_base 12: mod_base = OTHER; note = 2'-O- methyl
  modified_base 13: mod_base = OTHER; note = 2'-O- methyl
  modified_base 14: mod_base = OTHER; note = 2'-O- methyl
  modified_base 15: mod_base = OTHER; note = 2'-O- methyl
  modified_base 16: mod_base = OTHER; note = 2'-O- methyl
  modified_base 17: mod_base = OTHER; note = 2'- fluoro
  modified_base 18: mod_base = OTHER; note = 2'-O- methyl
  modified_base 19: mod_base = OTHER; note = 2'-O- methyl
  modified_base 20: mod_base = OTHER; note = 2'-O- methyl
  modified_base 21: mod_base = OTHER; note = 2'-O- methyl
  misc_binding 21: bound_moiety [[(1R,2R,3R,4R)-1-[[28-[[2-(acetylamino)-2-deoxy-beta-D-gal actopyranosyl]oxy]-13,13-bis[[3-[[3-[[5-[[2-(acetylamino)-2 -deoxy-beta-D-galactopyranosyl]oxy]-1-oxopentyl]amino]propy l]amino]-3-oxopropoxy]methyl]-11,18,24-trioxo-15-oxa-12,19, 23-triazaoctacosan-1-yl]oxy]-2-O-methyl-5-beta-D-ribofurano syl]hydrogen phosphate]
ccttttcttctaatgagtcga

SEQ ID NO: 531 - RNA, 21 nt, synthetic construct
  source 1..21: mol_type = other RNA
  modified_base 1: mod_base = OTHER; note = 2'-O- methyl, 3'- thiophosphate
  modified_base 2: mod_base = OTHER; note = 2'-O- methyl, 3'- thiophosphate
  modified_base 3: mod_base = OTHER; note = 2'-O- methyl
  modified_base 4: mod_base = OTHER; note = 2'-O- methyl
  modified_base 5: mod_base = OTHER; note = 2'-O- methyl
  modified_base 6: mod_base = OTHER; note = 2'-O- methyl
  modified_base 7: mod_base = OTHER; note = 2'- fluoro
  modified_base 8: mod_base = OTHER; note = 2'-O- methyl
  modified_base 9: mod_base = OTHER; note = 2'- fluoro
  modified_base 10: mod_base = OTHER; note = 2'- fluoro
  modified_base 11: mod_base = OTHER; note = 2'- fluoro
  modified_base 12: mod_base = OTHER; note = 2'-O- methyl
  modified_base 13: mod_base = OTHER; note = 2'-O- methyl
  modified_base 14: mod_base = OTHER; note = 2'-O- methyl
  modified_base 16: mod_base = OTHER; note = 2'-O- methyl
  modified_base 17: mod_base = OTHER; note = 2'- fluoro
  modified_base 18: mod_base = OTHER; note = 2'-O- methyl
  modified_base 19: mod_base = OTHER; note = 2'-O- methyl
  modified_base 20: mod_base = OTHER; note = 2'-O- methyl
  modified_base 21: mod_base = OTHER; note = 2'-O- methyl
  misc_binding 21: bound_moiety [[(1R,2R,3R,4R)-1-[[28-[[2-(acetylamino)-2-deoxy-beta-D-gal actopyranosyl]oxy]-13,13-bis[[3-[[3-[[5-[[2-(acetylamino)-2 -deoxy-beta-D-galactopyranosyl]oxy]-1-oxopentyl]amino]propy l]amino]-3-oxopropoxy]methyl]-11,18,24-trioxo-15-oxa-12,19, 23-triazaoctacosan-1-yl]oxy]-2-O-methyl-5-beta-D-ribofurano syl]hydrogen phosphate]
ccttttcttctaatgagtcga

SEQ ID NO: 532 - RNA, 21 nt, synthetic construct
  source 1..21: mol_type = other RNA
  modified_base 1: mod_base = OTHER; note = 2'-O- methyl, 3'- thiophosphate
  modified_base 2: mod_base = OTHER; note = 2'-O- methyl, 3'- thiophosphate
  modified_base 3: mod_base = OTHER; note = 2'-O- methyl
  modified_base 4: mod_base = OTHER; note = 2'-O- methyl
  modified_base 5: mod_base = OTHER; note = 2'-O- methyl
  modified_base 6: mod_base = OTHER; note = 2'-O- methyl
  modified_base 7: mod_base = OTHER; note = 2'- fluoro
  modified_base 8: mod_base = OTHER; note = 2'-O- methyl
  modified_base 9: mod_base = OTHER; note = 2'- fluoro
  modified_base 10: mod_base = OTHER; note = 2'- fluoro
  modified_base 11: mod_base = OTHER; note = 2'- fluoro
  modified_base 12: mod_base = OTHER; note = 2'-O- methyl
  modified_base 13: mod_base = OTHER; note = 2'-O- methyl
  modified_base 14: mod_base = OTHER; note = 2'-O- methyl
  modified_base 17: mod_base = OTHER; note = 2'- fluoro
  modified_base 18: mod_base = OTHER; note = 2'-O- methyl
  modified_base 19: mod_base = OTHER; note = 2'-O- methyl
  modified_base 20: mod_base = OTHER; note = 2'-O- methyl
  modified_base 21: mod_base = OTHER; note = 2'-O- methyl
  misc_binding 21: bound_moiety [[(1R,2R,3R,4R)-1-[[28-[[2-(acetylamino)-2-deoxy-beta-D-gal actopyranosyl]oxy]-13,13-bis[[3-[[3-[[5-[[2-(acetylamino)-2 -deoxy-beta-D-galactopyranosyl]oxy]-1-oxopentyl]amino]propy l]amino]-3-oxopropoxy]methyl]-11,18,24-trioxo-15-oxa-12,19, 23-triazaoctacosan-1-yl]oxy]-2-O-methyl-5-beta-D-ribofurano syl]hydrogen phosphate]
ccttttcttctaatgagtcga

SEQ ID NO: 533 - RNA, 21 nt, synthetic construct
  source 1..21: mol_type = other RNA
  modified_base 1: mod_base = OTHER; note = 2'-O- methyl, 3'- thiophosphate
  modified_base 2: mod_base = OTHER; note = 2'-O- methyl, 3'- thiophosphate
  modified_base 3: mod_base = OTHER; note = 2'-O- methyl
  modified_base 4: mod_base = OTHER; note = 2'-O- methyl
  modified_base 5: mod_base = OTHER; note = 2'-O- methyl
  modified_base 6: mod_base = OTHER; note = 2'-O- methyl
  modified_base 7: mod_base = OTHER; note = 2'- fluoro
  modified_base 8: mod_base = OTHER; note = 2'-O- methyl
  modified_base 9: mod_base = OTHER; note = 2'- fluoro
  modified_base 10: mod_base = OTHER; note = 2'- fluoro
  modified_base 11: mod_base = OTHER; note = 2'- fluoro
  modified_base 12: mod_base = OTHER; note = 2'-O- methyl
  modified_base 13: mod_base = OTHER; note = 2'-O- methyl
  modified_base 14: mod_base = OTHER; note = 2'-O- methyl
  modified_base 15: mod_base = OTHER; note = 2'-O- methyl
  modified_base 16: mod_base = OTHER; note = 2'-O- methyl
  modified_base 17: mod_base = OTHER; note = 2'- fluoro
  modified_base 18: mod_base = OTHER; note = 2'-O- methyl
  modified_base 19: mod_base = OTHER; note = 2'-O- methyl
  modified_base 20: mod_base = OTHER; note = 2'-O- methyl
  modified_base 21: mod_base = OTHER; note = 2'-O- methyl
  misc_binding 21: bound_moiety [[(1R,2R,3R,4R)-1-[[28-[[2-(acetylamino)-2-deoxy-beta-D-gal actopyranosyl]oxy]-13,13-bis[[3-[[3-[[5-[[2-(acetylamino)-2 -deoxy-beta-D-galactopyranosyl]oxy]-1-oxopentyl]amino]propy l]amino]-3-oxopropoxy]methyl]-11,18,24-trioxo-15-oxa-12,19, 23-triazaoctacosan-1-yl]oxy]-2-O-methyl-5-beta-D-ribofurano syl]hydrogen phosphate]
gtttgtgaaacaaaaaagtgt

SEQ ID NO: 534 - RNA, 21 nt, synthetic construct
  source 1..21: mol_type = other RNA
  modified_base 1: mod_base = OTHER; note = 2'-O- methyl, 3'- thiophosphate
  modified_base 2: mod_base = OTHER; note = 2'-O- methyl, 3'- thiophosphate
  modified_base 3: mod_base = OTHER; note = 2'-O- methyl
  modified_base 4: mod_base = OTHER; note = 2'-O- methyl
  modified_base 5: mod_base = OTHER; note = 2'-O- methyl
  modified_base 6: mod_base = OTHER; note = 2'-O- methyl
  modified_base 7: mod_base = OTHER; note = 2'- fluoro
  modified_base 8: mod_base = OTHER; note = 2'-O- methyl
  modified_base 9: mod_base = OTHER; note = 2'- fluoro
  modified_base 10: mod_base = OTHER; note = 2'- fluoro
  modified_base 11: mod_base = OTHER; note = 2'- fluoro
  modified_base 12: mod_base = OTHER; note = 2'-O- methyl
  modified_base 13: mod_base = OTHER; note = 2'-O- methyl
  modified_base 14: mod_base = OTHER; note = 2'-O- methyl
  modified_base 16: mod_base = OTHER; note = 2'-O- methyl
  modified_base 17: mod_base = OTHER; note = 2'- fluoro
  modified_base 18: mod_base = OTHER; note = 2'-O- methyl
  modified_base 19: mod_base = OTHER; note = 2'-O- methyl
  modified_base 20: mod_base = OTHER; note = 2'-O- methyl
  modified_base 21: mod_base = OTHER; note = 2'-O- methyl
  misc_binding 21: bound_moiety [[(1R,2R,3R,4R)-1-[[28-[[2-(acetylamino)-2-deoxy-beta-D-gal actopyranosyl]oxy]-13,13-bis[[3-[[3-[[5-[[2-(acetylamino)-2 -deoxy-beta-D-galactopyranosyl]oxy]-1-oxopentyl]amino]propy l]amino]-3-oxopropoxy]methyl]-11,18,24-trioxo-15-oxa-12,19, 23-triazaoctacosan-1-yl]oxy]-2-O-methyl-5-beta-D-ribofurano syl]hydrogen phosphate]
gtttgtgaaacaaaaaagtgt

SEQ ID NO: 535 - RNA, 21 nt, synthetic construct
  source 1..21: mol_type = other RNA
  modified_base 1..2: mod_base = OTHER; note = 2'-O- methyl, 3'- thiophosphate
  modified_base 3..6: mod_base = OTHER; note = 2'-O- methyl
  modified_base 8: mod_base = OTHER; note = 2'-O- methyl
  modified_base 12..14: mod_base = OTHER; note = 2'-O- methyl
  modified_base 18..21: mod_base = OTHER; note = 2'-O- methyl
  modified_base 7: mod_base = OTHER; note = 2'- fluoro
  modified_base 9..11: mod_base = OTHER; note = 2'- fluoro
  modified_base 17: mod_base = OTHER; note = 2'- fluoro
  modified_base 15..16: mod_base = OTHER; note = 2'-deoxyl
  misc_binding 21: bound_moiety [[(1R,2R,3R,4R)-1-[[28-[[2-(acetylamino)-2-deoxy-beta-D-gal actopyranosyl]oxy]-13,13-bis[[3-[[3-[[5-[[2-(acetylamino)-2 -deoxy-beta-D-galactopyranosyl]oxy]-1-oxopentyl]amino]propy l]amino]-3-oxopropoxy]methyl]-11,18,24-trioxo-15-oxa-12,19, 23-triazaoctacosan-1-yl]oxy]-2-O-methyl-5-beta-D-ribofurano syl]hydrogen phosphate]
gtttgtgaaacaaaaaagtgt

SEQ ID NO: 536 - RNA, 21 nt, synthetic construct
  source 1..21: mol_type = other RNA
  modified_base 1: mod_base = OTHER; note = 2'-O- methyl, 3'- thiophosphate
  modified_base 2: mod_base = OTHER; note = 2'-O- methyl, 3'- thiophosphate
  modified_base 3: mod_base = OTHER; note = 2'-O- methyl
  modified_base 4: mod_base = OTHER; note = 2'-O- methyl
  modified_base 5: mod_base = OTHER; note = 2'-O- methyl
  modified_base 6: mod_base = OTHER; note = 2'-O- methyl
  modified_base 7: mod_base = OTHER; note = 2'- fluoro
  modified_base 8: mod_base = OTHER; note = 2'-O- methyl
  modified_base 9: mod_base = OTHER; note = 2'- fluoro
  modified_base 10: mod_base = OTHER; note = 2'- fluoro
  modified_base 11: mod_base = OTHER; note = 2'- fluoro
  modified_base 12: mod_base = OTHER; note = 2'-O- methyl
  modified_base 13: mod_base = OTHER; note = 2'-O- methyl
  modified_base 14: mod_base = OTHER; note = 2'-O- methyl
  modified_base 15: mod_base = OTHER; note = 2'-O- methyl
  modified_base 16: mod_base = OTHER; note = 2'-O- methyl
  modified_base 17: mod_base = OTHER; note = 2'- fluoro
  modified_base 18: mod_base = OTHER; note = 2'-O- methyl
  modified_base 19: mod_base = OTHER; note = 2'-O- methyl
  modified_base 20: mod_base = OTHER; note = 2'-O- methyl
  modified_base 21: mod_base = OTHER; note = 2'-O- methyl
  misc_binding 21: bound_moiety [[(1R,2R,3R,4R)-1-[[28-[[2-(acetylamino)-2-deoxy-beta-D-gal actopyranosyl]oxy]-13,13-bis[[3-[[3-[[5-[[2-(acetylamino)-2 -deoxy-beta-D-galactopyranosyl]oxy]-1-oxopentyl]amino]propy l]amino]-3-oxopropoxy]methyl]-11,18,24-trioxo-15-oxa-12,19, 23-triazaoctacosan-1-yl]oxy]-2-O-methyl-5-beta-D-ribofurano syl]hydrogen phosphate]
ttgtgaaacaaaaaagtgtta

SEQ ID NO: 537 - RNA, 21 nt, synthetic construct
  source 1..21: mol_type = other RNA
  modified_base 1: mod_base = OTHER; note = 2'-O- methyl, 3'- thiophosphate
  modified_base 2: mod_base = OTHER; note = 2'-O- methyl, 3'- thiophosphate
  modified_base 3: mod_base = OTHER; note = 2'-O- methyl
  modified_base 4: mod_base = OTHER; note = 2'-O- methyl
  modified_base 5: mod_base = OTHER; note = 2'-O- methyl
  modified_base 6: mod_base = OTHER; note = 2'-O- methyl
  modified_base 7: mod_base = OTHER; note = 2'- fluoro
  modified_base 8: mod_base = OTHER; note = 2'-O- methyl
  modified_base 9: mod_base = OTHER; note = 2'- fluoro
  modified_base 10: mod_base = OTHER; note = 2'- fluoro
  modified_base 11: mod_base = OTHER; note = 2'- fluoro
  modified_base 12: mod_base = OTHER; note = 2'-O- methyl
  modified_base 13: mod_base = OTHER; note = 2'-O- methyl
  modified_base 14: mod_base = OTHER; note = 2'-O- methyl
  modified_base 16: mod_base = OTHER; note = 2'-O- methyl
  modified_base 17: mod_base = OTHER; note = 2'- fluoro
  modified_base 18: mod_base = OTHER; note = 2'-O- methyl
  modified_base 19: mod_base = OTHER; note = 2'-O- methyl
  modified_base 20: mod_base = OTHER; note = 2'-O- methyl
  modified_base 21: mod_base = OTHER; note = 2'-O- methyl
  misc_binding 21: bound_moiety [[(1R,2R,3R,4R)-1-[[28-[[2-(acetylamino)-2-deoxy-beta-D-gal actopyranosyl]oxy]-13,13-bis[[3-[[3-[[5-[[2-(acetylamino)-2 -deoxy-beta-D-galactopyranosyl]oxy]-1-oxopentyl]amino]propy l]amino]-3-oxopropoxy]methyl]-11,18,24-trioxo-15-oxa-12,19, 23-triazaoctacosan-1-yl]oxy]-2-O-methyl-5-beta-D-ribofurano syl]hydrogen phosphate]
ttgtgaaacaaaaaagtgtta

SEQ ID NO: 538 - RNA, 21 nt, synthetic construct
  source 1..21: mol_type = other RNA
  modified_base 1..2: mod_base = OTHER; note = 2'-O- methyl, 3'- thiophosphate
  modified_base 3..6: mod_base = OTHER; note = 2'-O- methyl
  modified_base 8: mod_base = OTHER; note = 2'-O- methyl
  modified_base 12..14: mod_base = OTHER; note = 2'-O- methyl
  modified_base 18..21: mod_base = OTHER; note = 2'-O- methyl
  modified_base 7: mod_base = OTHER; note = 2'- fluoro
  modified_base 9..11: mod_base = OTHER; note = 2'- fluoro
  modified_base 17: mod_base = OTHER; note = 2'- fluoro
  modified_base 15..16: mod_base = OTHER; note = 2'-deoxyl
  misc_binding 21: bound_moiety [[(1R,2R,3R,4R)-1-[[28-[[2-(acetylamino)-2-deoxy-beta-D-gal actopyranosyl]oxy]-13,13-bis[[3-[[3-[[5-[[2-(acetylamino)-2 -deoxy-beta-D-galactopyranosyl]oxy]-1-oxopentyl]amino]propy l]amino]-3-oxopropoxy]methyl]-11,18,24-trioxo-15-oxa-12,19, 23-triazaoctacosan-1-yl]oxy]-2-O-methyl-5-beta-D-ribofurano syl]hydrogen phosphate]
ttgtgaaacaaaaaagtgtta

SEQ ID NO: 539 - RNA, 21 nt, synthetic construct
  source 1..21: mol_type = other RNA
  modified_base 1: mod_base = OTHER; note = 2'-O- methyl, 3'- thiophosphate
  modified_base 2: mod_base = OTHER; note = 2'-O- methyl, 3'- thiophosphate
  modified_base 3: mod_base = OTHER; note = 2'-O- methyl
  modified_base 4: mod_base = OTHER; note = 2'-O- methyl
  modified_base 5: mod_base = OTHER; note = 2'-O- methyl
  modified_base 6: mod_base = OTHER; note = 2'-O- methyl
  modified_base 7: mod_base = OTHER; note = 2'- fluoro
  modified_base 8: mod_base = OTHER; note = 2'-O- methyl
  modified_base 9: mod_base = OTHER; note = 2'- fluoro
  modified_base 10: mod_base = OTHER; note = 2'- fluoro
  modified_base 11: mod_base = OTHER; note = 2'- fluoro
  modified_base 12: mod_base = OTHER; note = 2'-O- methyl
  modified_base 13: mod_base = OTHER; note = 2'-O- methyl
  modified_base 14: mod_base = OTHER; note = 2'-O- methyl
  modified_base 15: mod_base = OTHER; note = 2'-O- methyl
  modified_base 16: mod_base = OTHER; note = 2'-O- methyl
  modified_base 17: mod_base = OTHER; note = 2'- fluoro
  modified_base 18: mod_base = OTHER; note = 2'-O- methyl
  modified_base 19: mod_base = OTHER; note = 2'-O- methyl
  modified_base 20: mod_base = OTHER; note = 2'-O- methyl
  modified_base 21: mod_base = OTHER; note = 2'-O- methyl
  misc_binding 21: bound_moiety [[(1R,2R,3R,4R)-1-[[28-[[2-(acetylamino)-2-deoxy-beta-D-gal actopyranosyl]oxy]-13,13-bis[[3-[[3-[[5-[[2-(acetylamino)-2 -deoxy-beta-D-galactopyranosyl]oxy]-1-oxopentyl]amino]propy l]amino]-3-oxopropoxy]methyl]-11,18,24-trioxo-15-oxa-12,19, 23-triazaoctacosan-1-yl]oxy]-2-O-methyl-5-beta-D-ribofurano syl]hydrogen phosphate]
gaaacaaaaaagtgttccctt

SEQ ID NO: 540 - RNA, 21 nt, synthetic construct
  source 1..21: mol_type = other RNA
  modified_base 1..2: mod_base = OTHER; note = 2'-O- methyl, 3'- thiophosphate
  modified_base 3..6: mod_base = OTHER; note = 2'-O- methyl
  modified_base 8: mod_base = OTHER; note = 2'-O- methyl
  modified_base 12..14: mod_base = OTHER; note = 2'-O- methyl
  modified_base 18..21: mod_base = OTHER; note = 2'-O- methyl
  modified_base 7: mod_base = OTHER; note = 2'- fluoro
  modified_base 9..11: mod_base = OTHER; note = 2'- fluoro
  modified_base 17: mod_base = OTHER; note = 2'- fluoro
  modified_base 15..16: mod_base = OTHER; note = 2'-deoxylthymine
  misc_binding 21: bound_moiety [[(1R,2R,3R,4R)-1-[[28-[[2-(acetylamino)-2-deoxy-beta-D-gal actopyranosyl]oxy]-13,13-bis[[3-[[3-[[5-[[2-(acetylamino)-2 -deoxy-beta-D-galactopyranosyl]oxy]-1-oxopentyl]amino]propy l]amino]-3-oxopropoxy]methyl]-11,18,24-trioxo-15-oxa-12,19, 23-triazaoctacosan-1-yl]oxy]-2-O-methyl-5-beta-D-ribofurano syl]hydrogen phosphate]
gaaacaaaaaagtgttccctt

SEQ ID NO: 541 - RNA, 21 nt, synthetic construct
  source 1..21: mol_type = other RNA
  modified_base 1: mod_base = OTHER; note = 2'-O- methyl, 3'- thiophosphate
  modified_base 2: mod_base = OTHER; note = 2'-O- methyl, 3'- thiophosphate
  modified_base 3: mod_base = OTHER; note = 2'-O- methyl
  modified_base 4: mod_base = OTHER; note = 2'-O- methyl
  modified_base 5: mod_base = OTHER; note = 2'-O- methyl
  modified_base 6: mod_base = OTHER; note = 2'-O- methyl
  modified_base 7: mod_base = OTHER; note = 2'- fluoro
  modified_base 8: mod_base = OTHER; note = 2'-O- methyl
  modified_base 9: mod_base = OTHER; note = 2'- fluoro
  modified_base 10: mod_base = OTHER; note = 2'- fluoro
  modified_base 11: mod_base = OTHER; note = 2'- fluoro
  modified_base 12: mod_base = OTHER; note = 2'-O- methyl
  modified_base 13: mod_base = OTHER; note = 2'-O- methyl
  modified_base 14: mod_base = OTHER; note = 2'-O- methyl
  modified_base 15: mod_base = OTHER; note = 2'-O- methyl
  modified_base 16: mod_base = OTHER; note = 2'-O- methyl
  modified_base 17: mod_base = OTHER; note = 2'- fluoro
  modified_base 18: mod_base = OTHER; note = 2'-O- methyl
  modified_base 19: mod_base = OTHER; note = 2'-O- methyl
  modified_base 20: mod_base = OTHER; note = 2'-O- methyl
  modified_base 21: mod_base = OTHER; note = 2'-O- methyl
  misc_binding 21: bound_moiety [[(1R,2R,3R,4R)-1-[[28-[[2-(acetylamino)-2-deoxy-beta-D-gal actopyranosyl]oxy]-13,13-bis[[3-[[3-[[5-[[2-(acetylamino)-2 -deoxy-beta-D-galactopyranosyl]oxy]-1-oxopentyl]amino]propy l]amino]-3-oxopropoxy]methyl]-11,18,24-trioxo-15-oxa-12,19, 23-triazaoctacosan-1-yl]oxy]-2-O-methyl-5-beta-D-ribofurano syl]hydrogen phosphate]
ccttttcaagttgagaacaaa

SEQ ID NO: 542 - RNA, 21 nt, synthetic construct
  source 1..21: mol_type = other RNA
  modified_base 1..2: mod_base = OTHER; note = 2'-O- methyl, 3'- thiophosphate
  modified_base 3..6: mod_base = OTHER; note = 2'-O- methyl
  modified_base 8: mod_base = OTHER; note = 2'-O- methyl
  modified_base 12..14: mod_base = OTHER; note = 2'-O- methyl
  modified_base 18..21: mod_base = OTHER; note = 2'-O- methyl
  modified_base 7: mod_base = OTHER; note = 2'- fluoro
  modified_base 9..11: mod_base = OTHER; note = 2'- fluoro
  modified_base 17: mod_base = OTHER; note = 2'- fluoro
  modified_base 15..16: mod_base = OTHER; note = 2'-deoxyl
  misc_binding 21: bound_moiety [[(1R,2R,3R,4R)-1-[[28-[[2-(acetylamino)-2-deoxy-beta-D-gal actopyranosyl]oxy]-13,13-bis[[3-[[3-[[5-[[2-(acetylamino)-2 -deoxy-beta-D-galactopyranosyl]oxy]-1-oxopentyl]amino]propy l]amino]-3-oxopropoxy]methyl]-11,18,24-trioxo-15-oxa-12,19, 23-triazaoctacosan-1-yl]oxy]-2-O-methyl-5-beta-D-ribofurano syl]hydrogen phosphate]
ccttttcaagttgagaacaaa

SEQ ID NO: 543 - RNA, 21 nt, synthetic construct
  source 1..21: mol_type = other RNA
  modified_base 1: mod_base = OTHER; note = 2'-O- methyl, 3'- thiophosphate
  modified_base 2: mod_base = OTHER; note = 2'-O- methyl, 3'- thiophosphate
  modified_base 3: mod_base = OTHER; note = 2'-O- methyl
  modified_base 4: mod_base = OTHER; note = 2'-O- methyl
  modified_base 5: mod_base = OTHER; note = 2'-O- methyl
  modified_base 6: mod_base = OTHER; note = 2'-O- methyl
  modified_base 7: mod_base = OTHER; note = 2'- fluoro
  modified_base 8: mod_base = OTHER; note = 2'-O- methyl
  modified_base 9: mod_base = OTHER; note = 2'- fluoro
  modified_base 10: mod_base = OTHER; note = 2'- fluoro
  modified_base 11: mod_base = OTHER; note = 2'- fluoro
  modified_base 12: mod_base = OTHER; note = 2'-O- methyl
  modified_base 13: mod_base = OTHER; note = 2'-O- methyl
  modified_base 14: mod_base = OTHER; note = 2'-O- methyl
  modified_base 15: mod_base = OTHER; note = 2'-O- methyl
  modified_base 16: mod_base = OTHER; note = 2'-O- methyl
  modified_base 17: mod_base = OTHER; note = 2'- fluoro
  modified_base 18: mod_base = OTHER; note = 2'-O- methyl
  modified_base 19: mod_base = OTHER; note = 2'-O- methyl
  modified_base 20: mod_base = OTHER; note = 2'-O- methyl
  modified_base 21: mod_base = OTHER; note = 2'-O- methyl
  misc_binding 21: bound_moiety [[(1R,2R,3R,4R)-1-[[28-[[2-(acetylamino)-2-deoxy-beta-D-gal actopyranosyl]oxy]-13,13-bis[[3-[[3-[[5-[[2-(acetylamino)-2 -deoxy-beta-D-galactopyranosyl]oxy]-1-oxopentyl]amino]propy l]amino]-3-oxopropoxy]methyl]-11,18,24-trioxo-15-oxa-12,19, 23-triazaoctacosan-1-yl]oxy]-2-O-methyl-5-beta-D-ribofurano syl]hydrogen phosphate]
ttcaagttgagaacaaaaatt

SEQ ID NO: 544 - RNA, 21 nt, synthetic construct
  source 1..21: mol_type = other RNA
  modified_base 1..2: mod_base = OTHER; note = 2'-O- methyl, 3'- thiophosphate
  modified_base 3..6: mod_base = OTHER; note = 2'-O- methyl
  modified_base 8: mod_base = OTHER; note = 2'-O- methyl
  modified_base 12..14: mod_base = OTHER; note = 2'-O- methyl
  modified_base 18..21: mod_base = OTHER; note = 2'-O- methyl
  modified_base 7: mod_base = OTHER; note = 2'- fluoro
  modified_base 9..11: mod_base = OTHER; note = 2'- fluoro
  modified_base 17: mod_base = OTHER; note = 2'- fluoro
  modified_base 15..16: mod_base = OTHER; note = 2'-deoxyl
  misc_binding 21: bound_moiety [[(1R,2R,3R,4R)-1-[[28-[[2-(acetylamino)-2-deoxy-beta-D-gal actopyranosyl]oxy]-13,13-bis[[3-[[3-[[5-[[2-(acetylamino)-2 -deoxy-beta-D-galactopyranosyl]oxy]-1-oxopentyl]amino]propy l]amino]-3-oxopropoxy]methyl]-11,18,24-trioxo-15-oxa-12,19, 23-triazaoctacosan-1-yl]oxy]-2-O-methyl-5-beta-D-ribofurano syl]hydrogen phosphate]
ttcaagttgagaacaaaaatt

SEQ ID NO: 545 - RNA, 21 nt, synthetic construct
  source 1..21: mol_type = other RNA
  modified_base 1: mod_base = OTHER; note = 2'-O- methyl, 3'- thiophosphate
  modified_base 2: mod_base = OTHER; note = 2'-O- methyl, 3'- thiophosphate
  modified_base 3: mod_base = OTHER; note = 2'-O- methyl
  modified_base 4: mod_base = OTHER; note = 2'-O- methyl
  modified_base 5: mod_base = OTHER; note = 2'-O- methyl
  modified_base 6: mod_base = OTHER; note = 2'-O- methyl
  modified_base 7: mod_base = OTHER; note = 2'- fluoro
  modified_base 8: mod_base = OTHER; note = 2'-O- methyl
  modified_base 9: mod_base = OTHER; note = 2'- fluoro
  modified_base 10: mod_base = OTHER; note = 2'- fluoro
  modified_base 11: mod_base = OTHER; note = 2'- fluoro
  modified_base 12: mod_base = OTHER; note = 2'-O- methyl
  modified_base 13: mod_base = OTHER; note = 2'-O- methyl
  modified_base 14: mod_base = OTHER; note = 2'-O- methyl
  modified_base 15: mod_base = OTHER; note = 2'-O- methyl
  modified_base 16: mod_base = OTHER; note = 2'-O- methyl
  modified_base 17: mod_base = OTHER; note = 2'- fluoro
  modified_base 18: mod_base = OTHER; note = 2'-O- methyl
  modified_base 19: mod_base = OTHER; note = 2'-O- methyl
  modified_base 20: mod_base = OTHER; note = 2'-O- methyl
  modified_base 21: mod_base = OTHER; note = 2'-O- methyl
  misc_binding 21: bound_moiety [[(1R,2R,3R,4R)-1-[[28-[[2-(acetylamino)-2-deoxy-beta-D-gal actopyranosyl]oxy]-13,13-bis[[3-[[3-[[5-[[2-(acetylamino)-2 -deoxy-beta-D-galactopyranosyl]oxy]-1-oxopentyl]amino]propy l]amino]-3-oxopropoxy]methyl]-11,18,24-trioxo-15-oxa-12,19, 23-triazaoctacosan-1-yl]oxy]-2-O-methyl-5-beta-D-ribofurano syl]hydrogen phosphate]
ttgggttttaaaattaaagta

SEQ ID NO: 546 - RNA, 21 nt, synthetic construct
  source 1..21: mol_type = other RNA
  modified_base 1: mod_base = OTHER; note = 2'-O- methyl, 3'- thiophosphate
  modified_base 2: mod_base = OTHER; note = 2'-O- methyl, 3'- thiophosphate
  modified_base 3: mod_base = OTHER; note = 2'-O- methyl
  modified_base 4: mod_base = OTHER; note = 2'-O- methyl
  modified_base 5: mod_base = OTHER; note = 2'-O- methyl
  modified_base 6: mod_base = OTHER; note = 2'-O- methyl
  modified_base 7: mod_base = OTHER; note = 2'- fluoro
  modified_base 8: mod_base = OTHER; note = 2'-O- methyl
  modified_base 9: mod_base = OTHER; note = 2'- fluoro
  modified_base 10: mod_base = OTHER; note = 2'- fluoro
  modified_base 11: mod_base = OTHER; note = 2'- fluoro
  modified_base 12: mod_base = OTHER; note = 2'-O- methyl
  modified_base 13: mod_base = OTHER; note = 2'-O- methyl
  modified_base 14: mod_base = OTHER; note = 2'-O- methyl
  modified_base 16: mod_base = OTHER; note = 2'-O- methyl
  modified_base 17: mod_base = OTHER; note = 2'- fluoro
  modified_base 18: mod_base = OTHER; note = 2'-O- methyl
  modified_base 19: mod_base = OTHER; note = 2'-O- methyl
  modified_base 20: mod_base = OTHER; note = 2'-O- methyl
  modified_base 21: mod_base = OTHER; note = 2'-O- methyl
  misc_binding 21: bound_moiety [[(1R,2R,3R,4R)-1-[[28-[[2-(acetylamino)-2-deoxy-beta-D-gal actopyranosyl]oxy]-13,13-bis[[3-[[3-[[5-[[2-(acetylamino)-2 -deoxy-beta-D-galactopyranosyl]oxy]-1-oxopentyl]amino]propy l]amino]-3-oxopropoxy]methyl]-11,18,24-trioxo-15-oxa-12,19, 23-triazaoctacosan-1-yl]oxy]-2-O-methyl-5-beta-D-ribofurano syl]hydrogen phosphate]
ttgggttttaaaattaaagta

SEQ ID NO: 547 - RNA, 21 nt, synthetic construct
  source 1..21: mol_type = other RNA
  modified_base 1..2: mod_base = OTHER; note = 2'-O- methyl, 3'- thiophosphate
  modified_base 3..6: mod_base = OTHER; note = 2'-O- methyl
  modified_base 8: mod_base = OTHER; note = 2'-O- methyl
  modified_base 12..14: mod_base = OTHER; note = 2'-O- methyl
  modified_base 18..21: mod_base = OTHER; note = 2'-O- methyl
  modified_base 16: mod_base = OTHER; note = 2'-deoxyl
  modified_base 15: mod_base = OTHER; note = 2'-deoxylthymine
  modified_base 7: mod_base = OTHER; note = 2'- fluoro
  modified_base 9..11: mod_base = OTHER; note = 2'- fluoro
  modified_base 17: mod_base = OTHER; note = 2'- fluoro
  misc_binding 21: bound_moiety [[(1R,2R,3R,4R)-1-[[28-[[2-(acetylamino)-2-deoxy-beta-D-gal actopyranosyl]oxy]-13,13-bis[[3-[[3-[[5-[[2-(acetylamino)-2 -deoxy-beta-D-galactopyranosyl]oxy]-1-oxopentyl]amino]propy l]amino]-3-oxopropoxy]methyl]-11,18,24-trioxo-15-oxa-12,19, 23-triazaoctacosan-1-yl]oxy]-2-O-methyl-5-beta-D-ribofurano syl]hydrogen phosphate]
ttgggttttaaaattaaagta

SEQ ID NO: 548 - RNA, 21 nt, synthetic construct
  source 1..21: mol_type = other RNA
  modified_base 1: mod_base = OTHER; note = 2'-O- methyl, 3'- thiophosphate
  modified_base 2: mod_base = OTHER; note = 2'-O- methyl, 3'- thiophosphate
  modified_base 3: mod_base = OTHER; note = 2'-O- methyl
  modified_base 4: mod_base = OTHER; note = 2'-O- methyl
  modified_base 5: mod_base = OTHER; note = 2'-O- methyl
  modified_base 6: mod_base = OTHER; note = 2'-O- methyl
  modified_base 7: mod_base = OTHER; note = 2'- fluoro
  modified_base 8: mod_base = OTHER; note = 2'-O- methyl
  modified_base 9: mod_base = OTHER; note = 2'- fluoro
  modified_base 10: mod_base = OTHER; note = 2'-O- methyl
  modified_base 11: mod_base = OTHER; note = 2'- fluoro
  modified_base 12: mod_base = OTHER; note = 2'-O- methyl
  modified_base 13: mod_base = OTHER; note = 2'-O- methyl
  modified_base 14: mod_base = OTHER; note = 2'-O- methyl
  modified_base 15: mod_base = OTHER; note = 2'-O- methyl
  modified_base 16: mod_base = OTHER; note = 2'-O- methyl
  modified_base 17: mod_base = OTHER; note = 2'- fluoro
  modified_base 18: mod_base = OTHER; note = 2'-O- methyl
  modified_base 19: mod_base = OTHER; note = 2'-O- methyl
  modified_base 20: mod_base = OTHER; note = 2'-O- methyl
  modified_base 21: mod_base = OTHER; note = 2'-O- methyl
  misc_binding 21: bound_moiety [[(1R,2R,3R,4R)-1-[[28-[[2-(acetylamino)-2-deoxy-beta-D-gal actopyranosyl]oxy]-13,13-bis[[3-[[3-[[5-[[2-(acetylamino)-2 -deoxy-beta-D-galactopyranosyl]oxy]-1-oxopentyl]amino]propy l]amino]-3-oxopropoxy]methyl]-11,18,24-trioxo-15-oxa-12,19, 23-triazaoctacosan-1-yl]oxy]-2-O-methyl-5-beta-D-ribofurano syl]hydrogen phosphate]
ggttttaaaattaaagtataa

SEQ ID NO: 549 - RNA, 21 nt, synthetic construct
  source 1..21: mol_type = other RNA
  modified_base 1: mod_base = OTHER; note = 2'-O- methyl, 3'- thiophosphate
  modified_base 2: mod_base = OTHER; note = 2'-O- methyl, 3'- thiophosphate
  modified_base 3: mod_base = OTHER; note = 2'-O- methyl
  modified_base 4: mod_base = OTHER; note = 2'-O- methyl
  modified_base 5: mod_base = OTHER; note = 2'-O- methyl
  modified_base 6: mod_base = OTHER; note = 2'-O- methyl
  modified_base 7: mod_base = OTHER; note = 2'- fluoro
  modified_base 8: mod_base = OTHER; note = 2'-O- methyl
  modified_base 9: mod_base = OTHER; note = 2'- fluoro
  modified_base 10: mod_base = OTHER; note = 2'-O- methyl
  modified_base 11: mod_base = OTHER; note = 2'- fluoro
  modified_base 12: mod_base = OTHER; note = 2'-O- methyl
  modified_base 13: mod_base = OTHER; note = 2'-O- methyl
  modified_base 14: mod_base = OTHER; note = 2'-O- methyl
  modified_base 16: mod_base = OTHER; note = 2'-O- methyl
  modified_base 17: mod_base = OTHER; note = 2'- fluoro
  modified_base 18: mod_base = OTHER; note = 2'-O- methyl
  modified_base 19: mod_base = OTHER; note = 2'-O- methyl
  modified_base 20: mod_base = OTHER; note = 2'-O- methyl
  modified_base 21: mod_base = OTHER; note = 2'-O- methyl
  misc_binding 21: bound_moiety [[(1R,2R,3R,4R)-1-[[28-[[2-(acetylamino)-2-deoxy-beta-D-gal actopyranosyl]oxy]-13,13-bis[[3-[[3-[[5-[[2-(acetylamino)-2 -deoxy-beta-D-galactopyranosyl]oxy]-1-oxopentyl]amino]propy l]amino]-3-oxopropoxy]methyl]-11,18,24-trioxo-15-oxa-12,19, 23-triazaoctacosan-1-yl]oxy]-2-O-methyl-5-beta-D-ribofurano syl]hydrogen phosphate]
ggttttaaaattaaagtataa

SEQ ID NO: 550 - RNA, 21 nt, synthetic construct
  source 1..21: mol_type = other RNA
  modified_base 1..2: mod_base = OTHER; note = 2'-O- methyl, 3'- thiophosphate
  modified_base 3..6: mod_base = OTHER; note = 2'-O- methyl
  modified_base 8: mod_base = OTHER; note = 2'-O- methyl
  modified_base 12..14: mod_base = OTHER; note = 2'-O- methyl
  modified_base 18..21: mod_base = OTHER; note = 2'-O- methyl
  modified_base 10: mod_base = OTHER; note = 2'-O- methyl
  modified_base 7: mod_base = OTHER; note = 2'- fluoro
  modified_base 9: mod_base = OTHER; note = 2'- fluoro
  modified_base 11: mod_base = OTHER; note = 2'- fluoro
  modified_base 17: mod_base = OTHER; note = 2'- fluoro
  modified_base 15..16: mod_base = OTHER; note = 2'-deoxyl
  misc_binding 21: bound_moiety [[(1R,2R,3R,4R)-1-[[28-[[2-(acetylamino)-2-deoxy-beta-D-gal actopyranosyl]oxy]-13,13-bis[[3-[[3-[[5-[[2-(acetylamino)-2 -deoxy-beta-D-galactopyranosyl]oxy]-1-oxopentyl]amino]propy l]amino]-3-oxopropoxy]methyl]-11,18,24-trioxo-15-oxa-12,19, 23-triazaoctacosan-1-yl]oxy]-2-O-methyl-5-beta-D-ribofurano syl]hydrogen phosphate]
ggttttaaaattaaagtataa

SEQ ID NO: 551 - RNA, 21 nt, synthetic construct
  source 1..21: mol_type = other RNA
  modified_base 1: mod_base = OTHER; note = 2'-O- methyl, 3'- thiophosphate
  modified_base 2: mod_base = OTHER; note = 2'-O- methyl, 3'- thiophosphate
  modified_base 3: mod_base = OTHER; note = 2'-O- methyl
  modified_base 4: mod_base = OTHER; note = 2'-O- methyl
  modified_base 5: mod_base = OTHER; note = 2'-O- methyl
  modified_base 6: mod_base = OTHER; note = 2'-O- methyl
  modified_base 7: mod_base = OTHER; note = 2'- fluoro
  modified_base 8: mod_base = OTHER; note = 2'-O- methyl
  modified_base 9: mod_base = OTHER; note = 2'- fluoro
  modified_base 10: mod_base = OTHER; note = 2'-O- methyl
  modified_base 11: mod_base = OTHER; note = 2'- fluoro
  modified_base 12: mod_base = OTHER; note = 2'-O- methyl
  modified_base 13: mod_base = OTHER; note = 2'-O- methyl
  modified_base 14: mod_base = OTHER; note = 2'-O- methyl
  modified_base 15: mod_base = OTHER; note = 2'-O- methyl
  modified_base 16: mod_base = OTHER; note = 2'-O- methyl
  modified_base 17: mod_base = OTHER; note = 2'- fluoro
  modified_base 18: mod_base = OTHER; note = 2'-O- methyl
  modified_base 19: mod_base = OTHER; note = 2'-O- methyl
  modified_base 20: mod_base = OTHER; note = 2'-O- methyl
  modified_base 21: mod_base = OTHER; note = 2'-O- methyl
  misc_binding 21: bound_moiety [[(1R,2R,3R,4R)-1-[[28-[[2-(acetylamino)-2-deoxy-beta-D-gal actopyranosyl]oxy]-13,13-bis[[3-[[3-[[5-[[2-(acetylamino)-2 -deoxy-beta-D-galactopyranosyl]oxy]-1-oxopentyl]amino]propy l]amino]-3-oxopropoxy]methyl]-11,18,24-trioxo-15-oxa-12,19, 23-triazaoctacosan-1-yl]oxy]-2-O-methyl-5-beta-D-ribofurano syl]hydrogen phosphate]
gttttaaaattaaagtataca

SEQ ID NO: 552 - RNA, 21 nt, synthetic construct
  source 1..21: mol_type = other RNA
  modified_base 1: mod_base = OTHER; note = 2'-O- methyl, 3'- thiophosphate
  modified_base 2: mod_base = OTHER; note = 2'-O- methyl, 3'- thiophosphate
  modified_base 3: mod_base = OTHER; note = 2'-O- methyl
  modified_base 4: mod_base = OTHER; note = 2'-O- methyl
  modified_base 5: mod_base = OTHER; note = 2'-O- methyl
  modified_base 6: mod_base = OTHER; note = 2'-O- methyl
  modified_base 7: mod_base = OTHER; note = 2'- fluoro
  modified_base 8: mod_base = OTHER; note = 2'-O- methyl
  modified_base 9: mod_base = OTHER; note = 2'- fluoro
  modified_base 10: mod_base = OTHER; note = 2'-O- methyl
  modified_base 11: mod_base = OTHER; note = 2'- fluoro
  modified_base 12: mod_base = OTHER; note = 2'-O- methyl
  modified_base 13: mod_base = OTHER; note = 2'-O- methyl
  modified_base 14: mod_base = OTHER; note = 2'-O- methyl
  modified_base 16: mod_base = OTHER; note = 2'-O- methyl
  modified_base 17: mod_base = OTHER; note = 2'- fluoro
  modified_base 18: mod_base = OTHER; note = 2'-O- methyl
  modified_base 19: mod_base = OTHER; note = 2'-O- methyl
  modified_base 20: mod_base = OTHER; note = 2'-O- methyl
  modified_base 21: mod_base = OTHER; note = 2'-O- methyl
  misc_binding 21: bound_moiety [[(1R,2R,3R,4R)-1-[[28-[[2-(acetylamino)-2-deoxy-beta-D-gal actopyranosyl]oxy]-13,13-bis[[3-[[3-[[5-[[2-(acetylamino)-2 -deoxy-beta-D-galactopyranosyl]oxy]-1-oxopentyl]amino]propy l]amino]-3-oxopropoxy]methyl]-11,18,24-trioxo-15-oxa-12,19, 23-triazaoctacosan-1-yl]oxy]-2-O-methyl-5-beta-D-ribofurano syl]hydrogen phosphate]
gttttaaaattaaagtataca

SEQ ID NO: 553 - RNA, 21 nt, synthetic construct
  source 1..21: mol_type = other RNA
  modified_base 1..2: mod_base = OTHER; note = 2'-O- methyl, 3'- thiophosphate
  modified_base 3..6: mod_base = OTHER; note = 2'-O- methyl
  modified_base 8: mod_base = OTHER; note = 2'-O- methyl
  modified_base 12..14: mod_base = OTHER; note = 2'-O- methyl
  modified_base 18..21: mod_base = OTHER; note = 2'-O- methyl
  modified_base 15: mod_base = OTHER; note = 2'-deoxyl
  modified_base 16: mod_base = OTHER; note = 2'-deoxylthymine
  modified_base 10: mod_base = OTHER; note = 2'-O-methyl
  modified_base 7: mod_base = OTHER; note = 2'- fluoro
  modified_base 9: mod_base = OTHER; note = 2'- fluoro
  modified_base 11: mod_base = OTHER; note = 2'- fluoro
  modified_base 17: mod_base = OTHER; note = 2'- fluoro
  misc_binding 21: bound_moiety [[(1R,2R,3R,4R)-1-[[28-[[2-(acetylamino)-2-deoxy-beta-D-gal actopyranosyl]oxy]-13,13-bis[[3-[[3-[[5-[[2-(acetylamino)-2 -deoxy-beta-D-galactopyranosyl]oxy]-1-oxopentyl]amino]propy l]amino]-3-oxopropoxy]methyl]-11,18,24-trioxo-15-oxa-12,19, 23-triazaoctacosan-1-yl]oxy]-2-O-methyl-5-beta-D-ribofurano syl]hydrogen phosphate]
gttttaaaattaaagtataca

SEQ ID NO: 554 - RNA, 20 nt, synthetic construct
  source 1..20: mol_type = other RNA
  modified_base 1: mod_base = OTHER; note = 2'-O- methyl, 3'- thiophosphate
  modified_base 2: mod_base = OTHER; note = 2'-O- methyl, 3'- thiophosphate
  modified_base 3: mod_base = OTHER; note = 2'-O- methyl
  modified_base 4: mod_base = OTHER; note = 2'-O- methyl
  modified_base 5: mod_base = OTHER; note = 2'-O- methyl
  modified_base 6: mod_base = OTHER; note = 2'- fluoro
  modified_base 7: mod_base = OTHER; note = 2'-O- methyl
  modified_base 8: mod_base = OTHER; note = 2'- fluoro
  modified_base 9: mod_base = OTHER; note = 2'-O- methyl
  modified_base 10: mod_base = OTHER; note = 2'- fluoro
  modified_base 11: mod_base = OTHER; note = 2'-O- methyl
  modified_base 12: mod_base = OTHER; note = 2'-O- methyl
  modified_base 13: mod_base = OTHER; note = 2'-O- methyl
  modified_base 14: mod_base = OTHER; note = 2'-O- methyl
  modified_base 15: mod_base = OTHER; note = 2'-O- methyl
  modified_base 16: mod_base = OTHER; note = 2'- fluoro
  modified_base 17: mod_base = OTHER; note = 2'-O- methyl
  modified_base 18: mod_base = OTHER; note = 2'-O- methyl
  modified_base 19: mod_base = OTHER; note = 2'-O- methyl
  modified_base 20: mod_base = OTHER; note = 2'-O- methyl
  misc_binding 20: bound_moiety [[(1R,2R,3R,4R)-1-[[28-[[2-(acetylamino)-2-deoxy-beta-D-gal actopyranosyl]oxy]-13,13-bis[[3-[[3-[[5-[[2-(acetylamino)-2 -deoxy-beta-D-galactopyranosyl]oxy]-1-oxopentyl]amino]propy l]amino]-3-oxopropoxy]methyl]-11,18,24-trioxo-15-oxa-12,19, 23-triazaoctacosan-1-yl]oxy]-2-O-methyl-5-beta-D-ribofurano syl]hydrogen phosphate]
ccaccttttcttctaatgaa

SEQ ID NO: 555 - RNA, 20 nt, synthetic construct
  source 1..20: mol_type = other RNA
  modified_base 1: mod_base = OTHER; note = 2'-O- methyl, 3'- thiophosphate
  modified_base 2: mod_base = OTHER; note = 2'-O- methyl, 3'- thiophosphate
  modified_base 3: mod_base = OTHER; note = 2'-O- methyl
  modified_base 4: mod_base = OTHER; note = 2'-O- methyl
  modified_base 5: mod_base = OTHER; note = 2'-O- methyl
  modified_base 6: mod_base = OTHER; note = 2'- fluoro
  modified_base 7: mod_base = OTHER; note = 2'-O- methyl
  modified_base 8: mod_base = OTHER; note = 2'- fluoro
  modified_base 9: mod_base = OTHER; note = 2'-O- methyl
  modified_base 10: mod_base = OTHER; note = 2'- fluoro
  modified_base 11: mod_base = OTHER; note = 2'-O- methyl
  modified_base 12: mod_base = OTHER; note = 2'-O- methyl
  modified_base 13: mod_base = OTHER; note = 2'-O- methyl
  modified_base 15: mod_base = OTHER; note = 2'-O- methyl
  modified_base 16: mod_base = OTHER; note = 2'- fluoro
  modified_base 17: mod_base = OTHER; note = 2'-O- methyl
  modified_base 18: mod_base = OTHER; note = 2'-O- methyl
  modified_base 19: mod_base = OTHER; note = 2'-O- methyl
  modified_base 20: mod_base = OTHER; note = 2'-O- methyl
  misc_binding 20: bound_moiety [[(1R,2R,3R,4R)-1-[[28-[[2-(acetylamino)-2-deoxy-beta-D-gal actopyranosyl]oxy]-13,13-bis[[3-[[3-[[5-[[2-(acetylamino)-2 -deoxy-beta-D-galactopyranosyl]oxy]-1-oxopentyl]amino]propy l]amino]-3-oxopropoxy]methyl]-11,18,24-trioxo-15-oxa-12,19, 23-triazaoctacosan-1-yl]oxy]-2-O-methyl-5-beta-D-ribofurano syl]hydrogen phosphate]
ccaccttttcttctaatgaa

SEQ ID NO: 556 - RNA, 20 nt, synthetic construct
  source 1..20: mol_type = other RNA
  modified_base 1..2: mod_base = OTHER; note = 2'-O- methyl, 3'- thiophosphate
  modified_base 3..5: mod_base = OTHER; note = 2'-O- methyl
  modified_base 7: mod_base = OTHER; note = 2'-O- methyl
  modified_base 11..13: mod_base = OTHER; note = 2'-O- methyl
  modified_base 17..20: mod_base = OTHER; note = 2'-O- methyl
  modified_base 9: mod_base = OTHER; note = 2'-O-methyl
  modified_base 6: mod_base = OTHER; note = 2'- fluoro
  modified_base 8: mod_base = OTHER; note = 2'- fluoro
  modified_base 10: mod_base = OTHER; note = 2'- fluoro
  modified_base 16: mod_base = OTHER; note = 2'- fluoro
  modified_base 14: mod_base = OTHER; note = 2'-deoxylthymine
  modified_base 15: mod_base = OTHER; note = 2'-deoxyl
  misc_binding 20: bound_moiety [[(1R,2R,3R,4R)-1-[[28-[[2-(acetylamino)-2-deoxy-beta-D-gal actopyranosyl]oxy]-13,13-bis[[3-[[3-[[5-[[2-(acetylamino)-2 -deoxy-beta-D-galactopyranosyl]oxy]-1-oxopentyl]amino]propy l]amino]-3-oxopropoxy]methyl]-11,18,24-trioxo-15-oxa-12,19, 23-triazaoctacosan-1-yl]oxy]-2-O-methyl-5-beta-D-ribofurano syl]hydrogen phosphate]
ccaccttttcttctaatgaa

SEQ ID NO: 557 - RNA, 20 nt, synthetic construct
  source 1..20: mol_type = other RNA
  modified_base 1: mod_base = OTHER; note = 2'-O- methyl, 3'- thiophosphate
  modified_base 2: mod_base = OTHER; note = 2'-O- methyl, 3'- thiophosphate
  modified_base 3: mod_base = OTHER; note = 2'-O- methyl
  modified_base 4: mod_base = OTHER; note = 2'-O- methyl
  modified_base 5: mod_base = OTHER; note = 2'-O- methyl
  modified_base 6: mod_base = OTHER; note = 2'- fluoro
  modified_base 7: mod_base = OTHER; note = 2'-O- methyl
  modified_base 8: mod_base = OTHER; note = 2'- fluoro
  modified_base 9: mod_base = OTHER; note = 2'-O- methyl
  modified_base 10: mod_base = OTHER; note = 2'- fluoro
  modified_base 11: mod_base = OTHER; note = 2'-O- methyl
  modified_base 12: mod_base = OTHER; note = 2'-O- methyl
  modified_base 13: mod_base = OTHER; note = 2'-O- methyl
  modified_base 14: mod_base = OTHER; note = 2'-O- methyl
  modified_base 15: mod_base = OTHER; note = 2'-O- methyl
  modified_base 16: mod_base = OTHER; note = 2'- fluoro
  modified_base 17: mod_base = OTHER; note = 2'-O- methyl
  modified_base 18: mod_base = OTHER; note = 2'-O- methyl
  modified_base 19: mod_base = OTHER; note = 2'-O- methyl
  modified_base 20: mod_base = OTHER; note = 2'-O- methyl
  misc_binding 20: bound_moiety [[(1R,2R,3R,4R)-1-[[28-[[2-(acetylamino)-2-deoxy-beta-D-gal actopyranosyl]oxy]-13,13-bis[[3-[[3-[[5-[[2-(acetylamino)-2 -deoxy-beta-D-galactopyranosyl]oxy]-1-oxopentyl]amino]propy l]amino]-3-oxopropoxy]methyl]-11,18,24-trioxo-15-oxa-12,19, 23-triazaoctacosan-1-yl]oxy]-2-O-methyl-5-beta-D-ribofurano syl]hydrogen phosphate]
accttttcttctaatgagta

SEQ ID NO: 558 - RNA, 20 nt, synthetic construct
  source 1..20: mol_type = other RNA
  modified_base 1: mod_base = OTHER; note = 2'-O- methyl, 3'- thiophosphate
  modified_base 2: mod_base = OTHER; note = 2'-O- methyl, 3'- thiophosphate
  modified_base 3: mod_base = OTHER; note = 2'-O- methyl
  modified_base 4: mod_base = OTHER; note = 2'-O- methyl
  modified_base 5: mod_base = OTHER; note = 2'-O- methyl
  modified_base 6: mod_base = OTHER; note = 2'- fluoro
  modified_base 7: mod_base = OTHER; note = 2'-O- methyl
  modified_base 8: mod_base = OTHER; note = 2'- fluoro
  modified_base 9: mod_base = OTHER; note = 2'-O- methyl
  modified_base 10: mod_base = OTHER; note = 2'- fluoro
  modified_base 11: mod_base = OTHER; note = 2'-O- methyl
  modified_base 12: mod_base = OTHER; note = 2'-O- methyl
  modified_base 13: mod_base = OTHER; note = 2'-O- methyl
  modified_base 15: mod_base = OTHER; note = 2'-O- methyl
  modified_base 16: mod_base = OTHER; note = 2'- fluoro
  modified_base 17: mod_base = OTHER; note = 2'-O- methyl
  modified_base 18: mod_base = OTHER; note = 2'-O- methyl
  modified_base 19: mod_base = OTHER; note = 2'-O- methyl
  modified_base 20: mod_base = OTHER; note = 2'-O- methyl
  misc_binding 20: bound_moiety [[(1R,2R,3R,4R)-1-[[28-[[2-(acetylamino)-2-deoxy-beta-D-gal actopyranosyl]oxy]-13,13-bis[[3-[[3-[[5-[[2-(acetylamino)-2 -deoxy-beta-D-galactopyranosyl]oxy]-1-oxopentyl]amino]propy l]amino]-3-oxopropoxy]methyl]-11,18,24-trioxo-15-oxa-12,19, 23-triazaoctacosan-1-yl]oxy]-2-O-methyl-5-beta-D-ribofurano syl]hydrogen phosphate]
accttttcttctaatgagta

SEQ ID NO: 559 - RNA, 20 nt, synthetic construct
  source 1..20: mol_type = other RNA
  modified_base 1..2: mod_base = OTHER; note = 2'-O- methyl, 3'- thiophosphate
  modified_base 3..5: mod_base = OTHER; note = 2'-O-methyl
  modified_base 7: mod_base = OTHER; note = 2'-O-methyl
  modified_base 9: mod_base = OTHER; note = 2'-O-methyl
  modified_base 11..13: mod_base = OTHER; note = 2'-O-methyl
  modified_base 17..20: mod_base = OTHER; note = 2'-O-methyl
  modified_base 6: mod_base = OTHER; note = 2'- fluoro
  modified_base 8: mod_base = OTHER; note = 2'- fluoro
  modified_base 10: mod_base = OTHER; note = 2'- fluoro
  modified_base 16: mod_base = OTHER; note = 2'- fluoro
  modified_base 14: mod_base = OTHER; note = 2'-deoxyl
  modified_base 15: mod_base = OTHER; note = 2'-deoxylthymine
  misc_binding 20: bound_moiety [[(1R,2R,3R,4R)-1-[[28-[[2-(acetylamino)-2-deoxy-beta-D-gal actopyranosyl]oxy]-13,13-bis[[3-[[3-[[5-[[2-(acetylamino)-2 -deoxy-beta-D-galactopyranosyl]oxy]-1-oxopentyl]amino]propy l]amino]-3-oxopropoxy]methyl]-11,18,24-trioxo-15-oxa-12,19, 23-triazaoctacosan-1-yl]oxy]-2-O-methyl-5-beta-D-ribofurano syl]hydrogen phosphate]
accttttcttctaatgagta

SEQ ID NO: 560 - RNA, 20 nt, synthetic construct
  source 1..20: mol_type = other RNA
  modified_base 1: mod_base = OTHER; note = 2'-O- methyl, 3'- thiophosphate
  modified_base 2: mod_base = OTHER; note = 2'-O- methyl, 3'- thiophosphate
  modified_base 3: mod_base = OTHER; note = 2'-O- methyl
  modified_base 4: mod_base = OTHER; note = 2'-O- methyl
  modified_base 5: mod_base = OTHER; note = 2'-O- methyl
  modified_base 6: mod_base = OTHER; note = 2'- fluoro
  modified_base 7: mod_base = OTHER; note = 2'-O- methyl
  modified_base 8: mod_base = OTHER; note = 2'- fluoro
  modified_base 9: mod_base = OTHER; note = 2'- fluoro
  modified_base 10: mod_base = OTHER; note = 2'- fluoro
  modified_base 11: mod_base = OTHER; note = 2'-O- methyl
  modified_base 12: mod_base = OTHER; note = 2'-O- methyl
  modified_base 13: mod_base = OTHER; note = 2'-O- methyl
  modified_base 14: mod_base = OTHER; note = 2'-O- methyl
  modified_base 15: mod_base = OTHER; note = 2'-O- methyl
  modified_base 16: mod_base = OTHER; note = 2'- fluoro
  modified_base 17: mod_base = OTHER; note = 2'-O- methyl
  modified_base 18: mod_base = OTHER; note = 2'-O- methyl
  modified_base 19: mod_base = OTHER; note = 2'-O- methyl
  modified_base 20: mod_base = OTHER; note = 2'-O- methyl
  misc_binding 20: bound_moiety [[(1R,2R,3R,4R)-1-[[28-[[2-(acetylamino)-2-deoxy-beta-D-gal actopyranosyl]oxy]-13,13-bis[[3-[[3-[[5-[[2-(acetylamino)-2 -deoxy-beta-D-galactopyranosyl]oxy]-1-oxopentyl]amino]propy l]amino]-3-oxopropoxy]methyl]-11,18,24-trioxo-15-oxa-12,19, 23-triazaoctacosan-1-yl]oxy]-2-O-methyl-5-beta-D-ribofurano syl]hydrogen phosphate]
cttctaatgagtcgacttta

SEQ ID NO: 561 - RNA, 21 nt, synthetic construct
  source 1..21: mol_type = other RNA
  modified_base 1: mod_base = OTHER; note = 2'-O- methyl, 3'- thiophosphate
  modified_base 2: mod_base = OTHER; note = 2'-O- methyl, 3'- thiophosphate
  modified_base 3: mod_base = OTHER; note = 2'-O- methyl
  modified_base 4: mod_base = OTHER; note = 2'-O- methyl
  modified_base 5: mod_base = OTHER; note = 2'-O- methyl
  modified_base 6: mod_base = OTHER; note = 2'-O- methyl
  modified_base 7: mod_base = OTHER; note = 2'- fluoro
  modified_base 8: mod_base = OTHER; note = 2'-O- methyl
  modified_base 9: mod_base = OTHER; note = 2'- fluoro
  modified_base 10: mod_base = OTHER; note = 2'- fluoro
  modified_base 11: mod_base = OTHER; note = 2'- fluoro
  modified_base 12: mod_base = OTHER; note = 2'-O- methyl
  modified_base 13: mod_base = OTHER; note = 2'-O- methyl
  modified_base 14: mod_base = OTHER; note = 2'-O- methyl
  modified_base 15: mod_base = OTHER; note = 2'-O- methyl
  modified_base 16: mod_base = OTHER; note = 2'-O- methyl
  modified_base 17: mod_base = OTHER; note = 2'-O- methyl
  modified_base 18: mod_base = OTHER; note = 2'-O- methyl
  modified_base 19: mod_base = OTHER; note = 2'-O- methyl
  modified_base 20: mod_base = OTHER; note = 2'-O- methyl
  modified_base 21: mod_base = OTHER; note = 2'-O- methyl
  misc_binding 21: bound_moiety [[(2S,4R)-1-[29-[[2-(acetylamino)-2-deoxy-beta-D-galactopyr anosyl]oxy]-14,14-bis[[3-[[3-[[5-[[2-(acetylamino)-2-deoxy- beta-D-galactopyranosyl]oxy]-1-oxopentyl]amino]propyl]amino ]-3-oxopropoxy]methyl]-1,12,19,25-tetraoxo-16-oxa-13,20,24- triazanonacos-1-yl]-4-hydroxy-2-pyrrolidinyl]methyl hydrogen phosphate]
gtcatccacaatgagagtaca

SEQ ID NO: 562 - RNA, 21 nt, synthetic construct
  source 1..21: mol_type = other RNA
  modified_base 1: mod_base = OTHER; note = 2'-O- methyl, 3'- thiophosphate
  modified_base 2: mod_base = OTHER; note = 2'-O- methyl, 3'- thiophosphate
  modified_base 3: mod_base = OTHER; note = 2'-O- methyl
  modified_base 4: mod_base = OTHER; note = 2'-O- methyl
  modified_base 5: mod_base = OTHER; note = 2'-O- methyl
  modified_base 6: mod_base = OTHER; note = 2'-O- methyl
  modified_base 7: mod_base = OTHER; note = 2'- fluoro
  modified_base 8: mod_base = OTHER; note = 2'-O- methyl
  modified_base 9: mod_base = OTHER; note = 2'- fluoro
  modified_base 10: mod_base = OTHER; note = 2'-O- methyl
  modified_base 11: mod_base = OTHER; note = 2'- fluoro
  modified_base 12: mod_base = OTHER; note = 2'-O- methyl
  modified_base 13: mod_base = OTHER; note = 2'-O- methyl
  modified_base 14: mod_base = OTHER; note = 2'-O- methyl
  modified_base 15: mod_base = OTHER; note = 2'-O- methyl
  modified_base 16: mod_base = OTHER; note = 2'-O- methyl
  modified_base 17: mod_base = OTHER; note = 2'- fluoro
  modified_base 18: mod_base = OTHER; note = 2'-O- methyl
  modified_base 19: mod_base = OTHER; note = 2'-O- methyl
  modified_base 20: mod_base = OTHER; note = 2'-O- methyl
  modified_base 21: mod_base = OTHER; note = 2'-O- methyl
  misc_binding 21: bound_moiety [[(1R,2R,3R,4R)-1-[[28-[[2-(acetylamino)-2-deoxy-beta-D-gal actopyranosyl]oxy]-13,13-bis[[3-[[3-[[5-[[2-(acetylamino)-2 -deoxy-beta-D-galactopyranosyl]oxy]-1-oxopentyl]amino]propy l]amino]-3-oxopropoxy]methyl]-11,18,24-trioxo-15-oxa-12,19, 23-triazaoctacosan-1-yl]oxy]-2-O-methyl-5-beta-D-ribofurano syl]hydrogen phosphate]
gtgaaacaactagtgcacctc

SEQ ID NO: 563 - RNA, 21 nt, synthetic construct
  source 1..21: mol_type = other RNA
  modified_base 1..2: mod_base = OTHER; note = 2'-O- methyl, 3'- thiophosphate
  modified_base 3..6: mod_base = OTHER; note = 2'-O-methyl
  modified_base 8: mod_base = OTHER; note = 2'-O-methyl
  modified_base 12..21: mod_base = OTHER; note = 2'-O-methyl
  modified_base 7: mod_base = OTHER; note = 2'- fluoro
  modified_base 10..12: mod_base = OTHER; note = 2'- fluoro
gtcatccacaatgagagtaca

SEQ ID NO: 564 - RNA, 23 nt, synthetic construct
  source 1..23: mol_type = other RNA
  modified_base 1: mod_base = OTHER; note = 2'-O- methyl, 3'- thiophosphate, 5'-Ethenyl-(E)-phosphonate
  modified_base 2: mod_base = OTHER; note = 2'- fluoro, 3'- thiophosphate
  modified_base 3: mod_base = OTHER; note = 2'- fluoro
  modified_base 4: mod_base = OTHER; note = 2'- fluoro
  modified_base 5: mod_base = OTHER; note = 2'-O- methyl
  modified_base 6: mod_base = OTHER; note = Glycol Nucleic Acid
  modified_base 7: mod_base = OTHER; note = 2'-O- methyl
  modified_base 8: mod_base = OTHER; note = 2'-O- methyl
  modified_base 9: mod_base = OTHER; note = 2'-O- methyl
  modified_base 10: mod_base = OTHER; note = 2'-O- methyl
  modified_base 11: mod_base = OTHER; note = 2'-O- methyl
  modified_base 12: mod_base = OTHER; note = 2'-O- methyl
  modified_base 13: mod_base = OTHER; note = 2'-O- methyl
  modified_base 14: mod_base = OTHER; note = 2'- fluoro
  modified_base 15: mod_base = OTHER; note = 2'-O- methyl
  modified_base 16: mod_base = OTHER; note = 2'- fluoro
  modified_base 17: mod_base = OTHER; note = 2'-O- methyl
  modified_base 18: mod_base = OTHER; note = 2'-O- methyl
  modified_base 19: mod_base = OTHER; note = 2'-O- methyl
  modified_base 20: mod_base = OTHER; note = 2'-O- methyl
  modified_base 21: mod_base = OTHER; note = 2'-O- methyl, 3'- thiophosphate
  modified_base 22: mod_base = OTHER; note = 2'-O- methyl, 3'- thiophosphate
  modified_base 23: mod_base = OTHER; note = 2'-O- methyl
tactttaattttaaaacccaatt

SEQ ID NO: 565 - RNA, 23 nt, synthetic construct
  source 1..23: mol_type = other RNA
  modified_base 1: mod_base = OTHER; note = 2'-O- methyl, 3'- thiophosphate, 5'-Ethenyl-(E)-phosphonate
  modified_base 2: mod_base = OTHER; note = 2'- fluoro, 3'- thiophosphate
  modified_base 3: mod_base = OTHER; note = 2'- fluoro
  modified_base 4: mod_base = OTHER; note = 2'- fluoro
  modified_base 5: mod_base = OTHER; note = 2'-O- methyl
  modified_base 6: mod_base = OTHER; note = 2'- fluoro
  modified_base 8: mod_base = OTHER; note = 2'-O- methyl
  modified_base 9: mod_base = OTHER; note = 2'-O- methyl
  modified_base 10: mod_base = OTHER; note = 2'-O- methyl
  modified_base 11: mod_base = OTHER; note = 2'-O- methyl
  modified_base 12: mod_base = OTHER; note = 2'-O- methyl
  modified_base 13: mod_base = OTHER; note = 2'-O- methyl
  modified_base 14: mod_base = OTHER; note = 2'- fluoro
  modified_base 15: mod_base = OTHER; note = 2'-O- methyl
  modified_base 16: mod_base = OTHER; note = 2'- fluoro
  modified_base 17: mod_base = OTHER; note = 2'-O- methyl
  modified_base 18: mod_base = OTHER; note = 2'-O- methyl
  modified_base 19: mod_base = OTHER; note = 2'-O- methyl
  modified_base 20: mod_base = OTHER; note = 2'-O- methyl
  modified_base 21: mod_base = OTHER; note = 2'-O- methyl, 3'- thiophosphate
  modified_base 22: mod_base = OTHER; note = 2'-O- methyl, 3'- thiophosphate
  modified_base 23: mod_base = OTHER; note = 2'-O- methyl
tactttaattttaaaacccaatt

SEQ ID NO: 566 - RNA, 23 nt, synthetic construct
  source 1..23: mol_type = other RNA
  modified_base 1: mod_base = OTHER; note = 2'-O- methyl, 3'- thiophosphate, 5'-Ethenyl-(E)-phosphonate
  modified_base 2: mod_base = OTHER; note = 2'- fluoro, 3'- thiophosphate
  modified_base 3: mod_base = OTHER; note = 2'- fluoro
  modified_base 4: mod_base = OTHER; note = 2'- fluoro
  modified_base 5: mod_base = OTHER; note = 2'-O- methyl
  modified_base 8: mod_base = OTHER; note = 2'-O- methyl
  modified_base 9: mod_base = OTHER; note = 2'-O- methyl
  modified_base 10: mod_base = OTHER; note = 2'-O- methyl
  modified_base 11: mod_base = OTHER; note = 2'-O- methyl
  modified_base 12: mod_base = OTHER; note = 2'-O- methyl
  modified_base 13: mod_base = OTHER; note = 2'-O- methyl
  modified_base 14: mod_base = OTHER; note = 2'- fluoro
  modified_base 15: mod_base = OTHER; note = 2'-O- methyl
  modified_base 16: mod_base = OTHER; note = 2'- fluoro
  modified_base 17: mod_base = OTHER; note = 2'-O- methyl
  modified_base 18: mod_base = OTHER; note = 2'-O- methyl
  modified_base 19: mod_base = OTHER; note = 2'-O- methyl
  modified_base 20: mod_base = OTHER; note = 2'-O- methyl
  modified_base 21: mod_base = OTHER; note = 2'-O- methyl, 3'- thiophosphate
  modified_base 22: mod_base = OTHER; note = 2'-O- methyl, 3'- thiophosphate
  modified_base 23: mod_base = OTHER; note = 2'-O- methyl
tactttaattttaaaacccaatt

SEQ ID NO: 567 - RNA, 22 nt, synthetic construct
  source 1..22: mol_type = other RNA
  modified_base 1: mod_base = OTHER; note = 2'-O- methyl, 3'- thiophosphate, 5'-Ethenyl-(E)-phosphonate
  modified_base 2: mod_base = OTHER; note = 2'- fluoro, 3'- thiophosphate
  modified_base 3: mod_base = OTHER; note = 2'-O- methyl
  modified_base 4: mod_base = OTHER; note = 2'- fluoro
  modified_base 5: mod_base = OTHER; note = 2'- fluoro
  modified_base 6: mod_base = OTHER; note = Glycol Nucleic Acid
  modified_base 7: mod_base = OTHER; note = 2'-O- methyl
  modified_base 8: mod_base = OTHER; note = 2'-O- methyl
  modified_base 9: mod_base = OTHER; note = 2'-O- methyl
  modified_base 10: mod_base = OTHER; note = 2'-O- methyl
  modified_base 11: mod_base = OTHER; note = 2'-O- methyl
  modified_base 12: mod_base = OTHER; note = 2'-O- methyl
  modified_base 13: mod_base = OTHER; note = 2'-O- methyl
  modified_base 14: mod_base = OTHER; note = 2'- fluoro
  modified_base 15: mod_base = OTHER; note = 2'-O- methyl
  modified_base 16: mod_base = OTHER; note = 2'- fluoro
  modified_base 17: mod_base = OTHER; note = 2'-O- methyl
  modified_base 18: mod_base = OTHER; note = 2'-O- methyl
  modified_base 19: mod_base = OTHER; note = 2'-O- methyl
  modified_base 20: mod_base = OTHER; note = 2'-O- methyl, 3'- thiophosphate
  modified_base 21: mod_base = OTHER; note = 2'-O- methyl, 3'- thiophosphate
  modified_base 22: mod_base = OTHER; note = 2'-O- methyl
tactcattagaagaaaaggtgg

SEQ ID NO: 568 - RNA, 22 nt, synthetic construct
  source 1..22: mol_type = other RNA
  modified_base 1: mod_base = OTHER; note = 2'-O- methyl, 3'- thiophosphate, 5'-Ethenyl-(E)-phosphonate
  modified_base 2: mod_base = OTHER; note = 2'- fluoro, 3'- thiophosphate
  modified_base 3: mod_base = OTHER; note = 2'-O- methyl
  modified_base 4: mod_base = OTHER; note = 2'- fluoro
  modified_base 5: mod_base = OTHER; note = 2'- fluoro
  modified_base 8: mod_base = OTHER; note = 2'-O- methyl
  modified_base 9: mod_base = OTHER; note = 2'-O- methyl
  modified_base 10: mod_base = OTHER; note = 2'-O- methyl
  modified_base 11: mod_base = OTHER; note = 2'-O- methyl
  modified_base 12: mod_base = OTHER; note = 2'-O- methyl
  modified_base 13: mod_base = OTHER; note = 2'-O- methyl
  modified_base 14: mod_base = OTHER; note = 2'- fluoro
  modified_base 15: mod_base = OTHER; note = 2'-O- methyl
  modified_base 16: mod_base = OTHER; note = 2'- fluoro
  modified_base 17: mod_base = OTHER; note = 2'-O- methyl
  modified_base 18: mod_base = OTHER; note = 2'-O- methyl
  modified_base 19: mod_base = OTHER; note = 2'-O- methyl
  modified_base 20: mod_base = OTHER; note = 2'-O- methyl, 3'- thiophosphate
  modified_base 21: mod_base = OTHER; note = 2'-O- methyl, 3'- thiophosphate
  modified_base 22: mod_base = OTHER; note = 2'-O- methyl
tactcattagaagaaaaggtgg

SEQ ID NO: 569 - RNA, 21 nt, synthetic construct
  source 1..21: mol_type = other RNA
  modified_base 1: mod_base = OTHER; note = 2'-O- methyl, 3'- thiophosphate, 5'-Ethenyl-(E)-phosphonate
  modified_base 2: mod_base = OTHER; note = 2'- fluoro, 3'- thiophosphate
  modified_base 3: mod_base = OTHER; note = 2'-O- methyl
  modified_base 4: mod_base = OTHER; note = 2'- fluoro
  modified_base 5: mod_base = OTHER; note = 2'- fluoro
  modified_base 6: mod_base = OTHER; note = 2'- fluoro
  modified_base 8: mod_base = OTHER; note = 2'-O- methyl
  modified_base 9: mod_base = OTHER; note = 2'-O- methyl
  modified_base 10: mod_base = OTHER; note = 2'-O- methyl
  modified_base 11: mod_base = OTHER; note = 2'-O- methyl
  modified_base 12: mod_base = OTHER; note = 2'-O- methyl
  modified_base 13: mod_base = OTHER; note = 2'-O- methyl
  modified_base 14: mod_base = OTHER; note = 2'- fluoro
  modified_base 15: mod_base = OTHER; note = 2'-O- methyl
  modified_base 16: mod_base = OTHER; note = 2'- fluoro
  modified_base 17: mod_base = OTHER; note = 2'-O- methyl
  modified_base 18: mod_base = OTHER; note = 2'-O- methyl
  modified_base 19: mod_base = OTHER; note = 2'-O- methyl
  modified_base 20: mod_base = OTHER; note = 2'-O- methyl, 3'- thiophosphate
  modified_base 21: mod_base = OTHER; note = 2'-O- methyl, 3'- thiophosphate
tactcattagaagaaaaggtg

SEQ ID NO: 570 - RNA, 23 nt, synthetic construct
  source 1..23: mol_type = other RNA
  modified_base 1: mod_base = OTHER; note = 2'-O- methyl, 3'- thiophosphate, 5'-Ethenyl-(E)-phosphonate
  modified_base 2: mod_base = OTHER; note = 2'- fluoro, 3'- thiophosphate
  modified_base 3: mod_base = OTHER; note = 2'-O- methyl
  modified_base 4: mod_base = OTHER; note = 2'-O- methyl
  modified_base 5: mod_base = OTHER; note = 2'-O- methyl
  modified_base 6: mod_base = OTHER; note = 2'- fluoro
  modified_base 8: mod_base = OTHER; note = 2'-O- methyl
  modified_base 9: mod_base = OTHER; note = 2'-O- methyl
  modified_base 10: mod_base = OTHER; note = 2'-O- methyl
  modified_base 11: mod_base = OTHER; note = 2'-O- methyl
  modified_base 12: mod_base = OTHER; note = 2'-O- methyl
  modified_base 13: mod_base = OTHER; note = 2'-O- methyl
  modified_base 14: mod_base = OTHER; note = 2'- fluoro
  modified_base 15: mod_base = OTHER; note = 2'-O- methyl
  modified_base 16: mod_base = OTHER; note = 2'- fluoro
  modified_base 17: mod_base = OTHER; note = 2'-O- methyl
  modified_base 18: mod_base = OTHER; note = 2'-O- methyl
  modified_base 19: mod_base = OTHER; note = 2'-O- methyl
  modified_base 20: mod_base = OTHER; note = 2'-O- methyl
  modified_base 21: mod_base = OTHER; note = 2'-O- methyl, 3'- thiophosphate
  modified_base 22: mod_base = OTHER; note = 2'-O- methyl, 3'- thiophosphate
  modified_base 23: mod_base = OTHER; note = 2'-O- methyl
tcgactcattagaagaaaaggtg

SEQ ID NO: 571 - RNA, 23 nt, synthetic construct
  source 1..23: mol_type = other RNA
  modified_base 1: mod_base = OTHER; note = 2'-O- methyl, 3'- thiophosphate, 5'-Ethenyl-(E)-phosphonate
  modified_base 2: mod_base = OTHER; note = 2'- fluoro, 3'- thiophosphate
  modified_base 3: mod_base = OTHER; note = 2'-O- methyl
  modified_base 4: mod_base = OTHER; note = 2'-O- methyl
  modified_base 5: mod_base = OTHER; note = 2'-O- methyl
  modified_base 8: mod_base = OTHER; note = 2'-O- methyl
  modified_base 9: mod_base = OTHER; note = 2'-O- methyl
  modified_base 10: mod_base = OTHER; note = 2'-O- methyl
  modified_base 11: mod_base = OTHER; note = 2'-O- methyl
  modified_base 12: mod_base = OTHER; note = 2'-O- methyl
  modified_base 13: mod_base = OTHER; note = 2'-O- methyl
  modified_base 14: mod_base = OTHER; note = 2'- fluoro
  modified_base 15: mod_base = OTHER; note = 2'-O- methyl
  modified_base 16: mod_base = OTHER; note = 2'- fluoro
  modified_base 17: mod_base = OTHER; note = 2'-O- methyl
  modified_base 18: mod_base = OTHER; note = 2'-O- methyl
  modified_base 19: mod_base = OTHER; note = 2'-O- methyl
  modified_base 20: mod_base = OTHER; note = 2'-O- methyl
  modified_base 21: mod_base = OTHER; note = 2'-O- methyl, 3'- thiophosphate
  modified_base 22: mod_base = OTHER; note = 2'-O- methyl, 3'- thiophosphate
  modified_base 23: mod_base = OTHER; note = 2'-O- methyl
tcgactcattagaagaaaaggtg

SEQ ID NO: 572 - RNA, 23 nt, synthetic construct
  source 1..23: mol_type = other RNA
  modified_base 1: mod_base = OTHER; note = 2'-O- methyl, 3'- thiophosphate, 5'-Ethenyl-(E)-phosphonate
  modified_base 2: mod_base = OTHER; note = 2'- fluoro, 3'- thiophosphate
  modified_base 3: mod_base = OTHER; note = 2'- fluoro
  modified_base 4: mod_base = OTHER; note = 2'- fluoro
  modified_base 5: mod_base = OTHER; note = 2'-O- methyl
  modified_base 6: mod_base = OTHER; note = 2'- fluoro
  modified_base 8: mod_base = OTHER; note = 2'-O- methyl
  modified_base 9: mod_base = OTHER; note = 2'-O- methyl
  modified_base 10: mod_base = OTHER; note = 2'-O- methyl
  modified_base 11: mod_base = OTHER; note = 2'-O- methyl
  modified_base 12: mod_base = OTHER; note = 2'-O- methyl
  modified_base 13: mod_base = OTHER; note = 2'-O- methyl
  modified_base 14: mod_base = OTHER; note = 2'- fluoro
  modified_base 15: mod_base = OTHER; note = 2'-O- methyl
  modified_base 16: mod_base = OTHER; note = 2'- fluoro
  modified_base 17: mod_base = OTHER; note = 2'-O- methyl
  modified_base 18: mod_base = OTHER; note = 2'-O- methyl
  modified_base 19: mod_base = OTHER; note = 2'-O- methyl
  modified_base 20: mod_base = OTHER; note = 2'-O- methyl
  modified_base 21: mod_base = OTHER; note = 2'-O- methyl, 3'- thiophosphate
  modified_base 22: mod_base = OTHER; note = 2'-O- methyl, 3'- thiophosphate
  modified_base 23: mod_base = OTHER; note = 2'-O- methyl
acacttttttgtttcacaaacaa

SEQ ID NO: 573 - RNA, 23 nt, synthetic construct
  source 1..23: mol_type = other RNA
  modified_base 1: mod_base = OTHER; note = 2'-O- methyl, 3'- thiophosphate, 5'-Ethenyl-(E)-phosphonate
  modified_base 2: mod_base = OTHER; note = 2'- fluoro, 3'- thiophosphate
  modified_base 3: mod_base = OTHER; note = 2'-O- methyl
  modified_base 4: mod_base = OTHER; note = 2'-O- methyl
  modified_base 5: mod_base = OTHER; note = 2'-O- methyl
  modified_base 6: mod_base = OTHER; note = 2'- fluoro
  modified_base 8: mod_base = OTHER; note = 2'-O- methyl
  modified_base 9: mod_base = OTHER; note = 2'-O- methyl
  modified_base 10: mod_base = OTHER; note = 2'-O- methyl
  modified_base 11: mod_base = OTHER; note = 2'-O- methyl
  modified_base 12: mod_base = OTHER; note = 2'-O- methyl
  modified_base 13: mod_base = OTHER; note = 2'-O- methyl
  modified_base 14: mod_base = OTHER; note = 2'- fluoro
  modified_base 15: mod_base = OTHER; note = 2'-O- methyl
  modified_base 16: mod_base = OTHER; note = 2'- fluoro
  modified_base 17: mod_base = OTHER; note = 2'-O- methyl
  modified_base 18: mod_base = OTHER; note = 2'-O- methyl
  modified_base 19: mod_base = OTHER; note = 2'-O- methyl
  modified_base 20: mod_base = OTHER; note = 2'-O- methyl
  modified_base 21: mod_base = OTHER; note = 2'-O- methyl, 3'- thiophosphate
  modified_base 22: mod_base = OTHER; note = 2'-O- methyl, 3'- thiophosphate
  modified_base 23: mod_base = OTHER; note = 2'-O- methyl
acacttttttgtttcacaaacaa

SEQ ID NO: 574 - RNA, 23 nt, synthetic construct
  source 1..23: mol_type = other RNA
  modified_base 1: mod_base = OTHER; note = 5'-Ethenyl-(E)-phosphonate
  modified_base 2: mod_base = OTHER; note = 2'- fluoro, 3'- thiophosphate
  modified_base 3..4: mod_base = OTHER; note = 2'- fluoro
  modified_base 14: mod_base = OTHER; note = 2'- fluoro
  modified_base 16: mod_base = OTHER; note = 2'- fluoro
  modified_base 5: mod_base = OTHER; note = 2'-O-methyl
  modified_base 8..13: mod_base = OTHER; note = 2'-O-methyl
  modified_base 15: mod_base = OTHER; note = 2'-O-methyl
  modified_base 17..20: mod_base = OTHER; note = 2'-O-methyl
  modified_base 23: mod_base = OTHER; note = 2'-O-methyl
  modified_base 6..7: mod_base = OTHER; note = 2'-deoxylthymine
  modified_base 21..22: mod_base = OTHER; note = 2'-O-methyl, 3'- thiophosphate
acacttttttgtttcacaaacaa

SEQ ID NO: 575 - RNA, 23 nt, synthetic construct
  source 1..23: mol_type = other RNA
  modified_base 1: mod_base = OTHER; note = 5'-Ethenyl-(E)-phosphonate
  modified_base 2: mod_base = OTHER; note = 2'- fluoro, 3'- thiophosphate
  modified_base 3..5: mod_base = OTHER; note = 2'-O-methyl
  modified_base 8..13: mod_base = OTHER; note = 2'-O-methyl
  modified_base 15: mod_base = OTHER; note = 2'-O-methyl
  modified_base 17..20: mod_base = OTHER; note = 2'-O-methyl
  modified_base 23: mod_base = OTHER; note = 2'-O-methyl
  modified_base 6..7: mod_base = OTHER; note = 2'-deoxylthymine
  modified_base 14: mod_base = OTHER; note = 2'- fluoro
  modified_base 16: mod_base = OTHER; note = 2'- fluoro
  modified_base 21..22: mod_base = OTHER; note = 2'-O-methyl, 3'- thiophosphate
acacttttttgtttcacaaacaa

SEQ ID NO: 576 - RNA, 23 nt, synthetic construct
  source 1..23: mol_type = other RNA
  modified_base 1: mod_base = OTHER; note = 2'-O- methyl, 3'- thiophosphate, 5'-Ethenyl-(E)-phosphonate
  modified_base 2: mod_base = OTHER; note = 2'- fluoro, 3'- thiophosphate
  modified_base 3: mod_base = OTHER; note = 2'- fluoro
  modified_base 4: mod_base = OTHER; note = 2'- fluoro
  modified_base 5: mod_base = OTHER; note = 2'-O- methyl
  modified_base 6: mod_base = OTHER; note = 2'- fluoro
  modified_base 8: mod_base = OTHER; note = 2'-O- methyl
  modified_base 9: mod_base = OTHER; note = 2'-O- methyl
  modified_base 10: mod_base = OTHER; note = 2'-O- methyl
  modified_base 11: mod_base = OTHER; note = 2'-O- methyl
  modified_base 12: mod_base = OTHER; note = 2'-O- methyl
  modified_base 13: mod_base = OTHER; note = 2'-O- methyl
  modified_base 14: mod_base = OTHER; note = 2'- fluoro
  modified_base 15: mod_base = OTHER; note = 2'-O- methyl
  modified_base 16: mod_base = OTHER; note = 2'- fluoro
  modified_base 17: mod_base = OTHER; note = 2'-O- methyl
  modified_base 18: mod_base = OTHER; note = 2'-O- methyl
  modified_base 19: mod_base = OTHER; note = 2'-O- methyl
  modified_base 20: mod_base = OTHER; note = 2'-O- methyl
  modified_base 21: mod_base = OTHER; note = 2'-O- methyl, 3'- thiophosphate
  modified_base 22: mod_base = OTHER; note = 2'-O- methyl, 3'- thiophosphate
  modified_base 23: mod_base = OTHER; note = 2'-O- methyl
taacacttttttgtttcacaaac

SEQ ID NO: 577 - RNA, 23 nt, synthetic construct
  source 1..23: mol_type = other RNA
  modified_base 1: mod_base = OTHER; note = 5'-Ethenyl-(E)-phosphonate
  modified_base 2: mod_base = OTHER; note = 2'- fluoro, 3'- thiophosphate
  modified_base 3..4: mod_base = OTHER; note = 2'- fluoro
  modified_base 14: mod_base = OTHER; note = 2'- fluoro
  modified_base 16: mod_base = OTHER; note = 2'- fluoro
  modified_base 5: mod_base = OTHER; note = 2'-O-methyl
  modified_base 8..13: mod_base = OTHER; note = 2'-O-methyl
  modified_base 15: mod_base = OTHER; note = 2'-O-methyl
  modified_base 17..20: mod_base = OTHER; note = 2'-O-methyl
  modified_base 23: mod_base = OTHER; note = 2'-O-methyl
  modified_base 21..22: mod_base = OTHER; note = 2'-O-methyl, 3'- thiophosphate
  modified_base 6: mod_base = OTHER; note = 2'-deoxyl
  modified_base 7: mod_base = OTHER; note = 2'-deoxylthymine
taacacttttttgtttcacaaac

SEQ ID NO: 578 - RNA, 23 nt, synthetic construct
  source 1..23: mol_type = other RNA
  modified_base 1: mod_base = OTHER; note = 5'-Ethenyl-(E)-phosphonate
  modified_base 2: mod_base = OTHER; note = 2'- fluoro, 3'- thiophosphate
  modified_base 21..22: mod_base = OTHER; note = 2'-O-methyl, 3'- thiophosphate
  modified_base 3: mod_base = OTHER; note = 2'-O-methyl
  modified_base 8..13: mod_base = OTHER; note = 2'-O-methyl
  modified_base 15: mod_base = OTHER; note = 2'-O-methyl
  modified_base 17..20: mod_base = OTHER; note = 2'-O-methyl
  modified_base 23: mod_base = OTHER; note = 2'-O-methyl
  modified_base 4..5: mod_base = OTHER; note = 2'- fluoro
  modified_base 14: mod_base = OTHER; note = 2'- fluoro
  modified_base 16: mod_base = OTHER; note = 2'- fluoro
  modified_base 6..7: mod_base = OTHER; note = 2'-deoxyl
aagggaacacttttttgtttcac

SEQ ID NO: 579 - RNA, 23 nt, synthetic construct
  source 1..23: mol_type = other RNA
  modified_base 1: mod_base = OTHER; note = 5'-Ethenyl-(E)-phosphonate
  modified_base 2: mod_base = OTHER; note = 2'- fluoro, 3'- thiophosphate
  modified_base 21..22: mod_base = OTHER; note = 2'-O-methyl, 3'- thiophosphate
  modified_base 3..5: mod_base = OTHER; note = 2'-O-methyl
  modified_base 8..13: mod_base = OTHER; note = 2'-O-methyl
  modified_base 15: mod_base = OTHER; note = 2'-O-methyl
  modified_base 17..20: mod_base = OTHER; note = 2'-O-methyl
  modified_base 23: mod_base = OTHER; note = 2'-O-methyl
  modified_base 14: mod_base = OTHER; note = 2'- fluoro
  modified_base 16: mod_base = OTHER; note = 2'- fluoro
  modified_base 6: mod_base = OTHER; note = 2'-deoxylthymine
  modified_base 7: mod_base = OTHER; note = 2'-deoxyl
tttgttctcaacttgaaaaggga

SEQ ID NO: 580 - RNA, 23 nt, synthetic construct
  source 1..23: mol_type = other RNA
  modified_base 1: mod_base = OTHER; note = 5'-Ethenyl-(E)-phosphonate
  modified_base 2: mod_base = OTHER; note = 2'- fluoro, 3'- thiophosphate
  modified_base 21..22: mod_base = OTHER; note = 2'-O-methyl, 3'- thiophosphate
  modified_base 3..5: mod_base = OTHER; note = 2'-O-methyl
  modified_base 8..13: mod_base = OTHER; note = 2'-O-methyl
  modified_base 15: mod_base = OTHER; note = 2'-O-methyl
  modified_base 17..20: mod_base = OTHER; note = 2'-O-methyl
  modified_base 23: mod_base = OTHER; note = 2'-O-methyl
  modified_base 6..7: mod_base = OTHER; note = 2'-deoxylthymine
  modified_base 14: mod_base = OTHER; note = 2'- fluoro
  modified_base 16: mod_base = OTHER; note = 2'- fluoro
aatttttgttctcaacttgaaaa

SEQ ID NO: 581 - RNA, 23 nt, synthetic construct
  source 1..23: mol_type = other RNA
  modified_base 1: mod_base = OTHER; note = 2'-O- methyl, 3'- thiophosphate, 5'-Ethenyl-(E)-phosphonate
  modified_base 2: mod_base = OTHER; note = 2'- fluoro, 3'- thiophosphate
  modified_base 3: mod_base = OTHER; note = 2'-O- methyl
  modified_base 4: mod_base = OTHER; note = 2'- fluoro
  modified_base 5: mod_base = OTHER; note = 2'- fluoro
  modified_base 6: mod_base = OTHER; note = 2'- fluoro
  modified_base 8: mod_base = OTHER; note = 2'-O- methyl
  modified_base 9: mod_base = OTHER; note = 2'-O- methyl
  modified_base 10: mod_base = OTHER; note = 2'-O- methyl
  modified_base 11: mod_base = OTHER; note = 2'-O- methyl
  modified_base 12: mod_base = OTHER; note = 2'-O- methyl
  modified_base 13: mod_base = OTHER; note = 2'-O- methyl
  modified_base 14: mod_base = OTHER; note = 2'- fluoro
  modified_base 15: mod_base = OTHER; note = 2'-O- methyl
  modified_base 16: mod_base = OTHER; note = 2'- fluoro
  modified_base 17: mod_base = OTHER; note = 2'-O- methyl
  modified_base 18: mod_base = OTHER; note = 2'-O- methyl
  modified_base 19: mod_base = OTHER; note = 2'-O- methyl
  modified_base 20: mod_base = OTHER; note = 2'-O- methyl
  modified_base 21: mod_base = OTHER; note = 2'-O- methyl, 3'- thiophosphate
  modified_base 22: mod_base = OTHER; note = 2'-O- methyl, 3'- thiophosphate
  modified_base 23: mod_base = OTHER; note = 2'-O- methyl
ttatactttaattttaaaaccca

SEQ ID NO: 582 - RNA, 23 nt, synthetic construct
  source 1..23: mol_type = other RNA
  modified_base 1: mod_base = OTHER; note = 5'-Ethenyl-(E)-phosphonate
  modified_base 2: mod_base = OTHER; note = 2'- fluoro, 3'- thiophosphate
  modified_base 21..22: mod_base = OTHER; note = 2'-O-methyl, 3'- thiophosphate
  modified_base 3: mod_base = OTHER; note = 2'-O-methyl
  modified_base 8..13: mod_base = OTHER; note = 2'-O-methyl
  modified_base 15: mod_base = OTHER; note = 2'-O-methyl
  modified_base 17..20: mod_base = OTHER; note = 2'-O-methyl
  modified_base 23: mod_base = OTHER; note = 2'-O-methyl
  modified_base 4..5: mod_base = OTHER; note = 2'- fluoro
  modified_base 14: mod_base = OTHER; note = 2'- fluoro
  modified_base 16: mod_base = OTHER; note = 2'- fluoro
  modified_base 6: mod_base = OTHER; note = 2'-deoxyl
  modified_base 7: mod_base = OTHER; note = 2'-deoxylthymine
ttatactttaattttaaaaccca

SEQ ID NO: 583 - RNA, 23 nt, synthetic construct
  source 1..23: mol_type = other RNA
  modified_base 1: mod_base = OTHER; note = 2'-O- methyl, 3'- thiophosphate, 5'-Ethenyl-(E)-phosphonate
  modified_base 2: mod_base = OTHER; note = 2'- fluoro, 3'- thiophosphate
  modified_base 3: mod_base = OTHER; note = 2'-O- methyl
  modified_base 4: mod_base = OTHER; note = 2'- fluoro
  modified_base 5: mod_base = OTHER; note = 2'- fluoro
  modified_base 6: mod_base = OTHER; note = 2'- fluoro
  modified_base 8: mod_base = OTHER; note = 2'-O- methyl
  modified_base 9: mod_base = OTHER; note = 2'-O- methyl
  modified_base 10: mod_base = OTHER; note = 2'-O- methyl
  modified_base 11: mod_base = OTHER; note = 2'-O- methyl
  modified_base 12: mod_base = OTHER; note = 2'-O- methyl
  modified_base 13: mod_base = OTHER; note = 2'-O- methyl
  modified_base 14: mod_base = OTHER; note = 2'- fluoro
  modified_base 15: mod_base = OTHER; note = 2'-O- methyl
  modified_base 16: mod_base = OTHER; note = 2'- fluoro
  modified_base 17: mod_base = OTHER; note = 2'-O- methyl
  modified_base 18: mod_base = OTHER; note = 2'-O- methyl
  modified_base 19: mod_base = OTHER; note = 2'-O- methyl
  modified_base 20: mod_base = OTHER; note = 2'-O- methyl
  modified_base 21: mod_base = OTHER; note = 2'-O- methyl, 3'- thiophosphate
  modified_base 22: mod_base = OTHER; note = 2'-O- methyl, 3'- thiophosphate
  modified_base 23: mod_base = OTHER; note = 2'-O- methyl
tgtatactttaattttaaaaccc

SEQ ID NO: 584 - RNA, 23 nt, synthetic construct
  source 1..23: mol_type = other RNA
  modified_base 1: mod_base = OTHER; note = 5'-Ethenyl-(E)-phosphonate
  modified_base 2: mod_base = OTHER; note = 2'- fluoro, 3'- thiophosphate
  modified_base 20..21: mod_base = OTHER; note = 2'-O-methyl, 3'- thiophosphate
  modified_base 3: mod_base = OTHER; note = 2'-O-methyl
  modified_base 8..13: mod_base = OTHER; note = 2'-O-methyl
  modified_base 15: mod_base = OTHER; note = 2'-O-methyl
  modified_base 17..20: mod_base = OTHER; note = 2'-O-methyl
  modified_base 23: mod_base = OTHER; note = 2'-O-methyl
  modified_base 6..7: mod_base = OTHER; note = 2'-deoxyl
  modified_base 4..5: mod_base = OTHER; note = 2'- fluoro
  modified_base 14: mod_base = OTHER; note = 2'- fluoro
  modified_base 16: mod_base = OTHER; note = 2'- fluoro
tgtatactttaattttaaaaccc

SEQ ID NO: 585 - RNA, 22 nt, synthetic construct
  source 1..22: mol_type = other RNA
  modified_base 1: mod_base = OTHER; note = 2'-O- methyl, 3'- thiophosphate, 5'-Ethenyl-(E)-phosphonate
  modified_base 2: mod_base = OTHER; note = 2'- fluoro, 3'- thiophosphate
  modified_base 3: mod_base = OTHER; note = 2'-O- methyl
  modified_base 4: mod_base = OTHER; note = 2'- fluoro
  modified_base 5: mod_base = OTHER; note = 2'- fluoro
  modified_base 6: mod_base = OTHER; note = 2'- fluoro
  modified_base 8: mod_base = OTHER; note = 2'-O- methyl
  modified_base 9: mod_base = OTHER; note = 2'-O- methyl
  modified_base 10: mod_base = OTHER; note = 2'-O- methyl
  modified_base 11: mod_base = OTHER; note = 2'-O- methyl
  modified_base 12: mod_base = OTHER; note = 2'-O- methyl
  modified_base 13: mod_base = OTHER; note = 2'-O- methyl
  modified_base 14: mod_base = OTHER; note = 2'- fluoro
  modified_base 15: mod_base = OTHER; note = 2'-O- methyl
  modified_base 16: mod_base = OTHER; note = 2'- fluoro
  modified_base 17: mod_base = OTHER; note = 2'-O- methyl
  modified_base 18: mod_base = OTHER; note = 2'-O- methyl
  modified_base 19: mod_base = OTHER; note = 2'-O- methyl
  modified_base 20: mod_base = OTHER; note = 2'-O- methyl, 3'- thiophosphate
  modified_base 21: mod_base = OTHER; note = 2'-O- methyl, 3'- thiophosphate
  modified_base 22: mod_base = OTHER; note = 2'-O- methyl
ttcattagaagaaaaggtggga

SEQ ID NO: 586 - RNA, 22 nt, synthetic construct
  source 1..22: mol_type = other RNA
  modified_base 1: mod_base = OTHER; note = 5'-Ethenyl-(E)-phosphonate
  modified_base 2: mod_base = OTHER; note = 2'- fluoro, 3'- thiophosphate
  modified_base 20..21: mod_base = OTHER; note = 2'-O-methyl, 3'- thiophosphate
  modified_base 3: mod_base = OTHER; note = 2'-O-methyl
  modified_base 8..13: mod_base = OTHER; note = 2'-O-methyl
  modified_base 15: mod_base = OTHER; note = 2'-O-methyl
  modified_base 17..19: mod_base = OTHER; note = 2'-O-methyl
  modified_base 22: mod_base = OTHER; note = 2'-O-methyl
  modified_base 4..5: mod_base = OTHER; note = 2'- fluoro
  modified_base 14: mod_base = OTHER; note = 2'- fluoro
  modified_base 16: mod_base = OTHER; note = 2'- fluoro
  modified_base 6: mod_base = OTHER; note = 2'-deoxylthymine
  modified_base 7: mod_base = OTHER; note = 2'-deoxyl
ttcattagaagaaaaggtggga

SEQ ID NO: 587 - RNA, 23 nt, synthetic construct
  source 1..23: mol_type = other RNA
  modified_base 1: mod_base = OTHER; note = 2'-O- methyl, 3'- thiophosphate
  modified_base 2: mod_base = OTHER; note = 2'- fluoro, 3'- thiophosphate
  modified_base 3: mod_base = OTHER; note = 2'-O- methyl
  modified_base 4: mod_base = OTHER; note = 2'-O- methyl
  modified_base 5: mod_base = OTHER; note = 2'-O- methyl
  modified_base 6: mod_base = OTHER; note = Glycol Nucleic Acid
  modified_base 7: mod_base = OTHER; note = 2'-O- methyl
  modified_base 8: mod_base = OTHER; note = 2'-O- methyl
  modified_base 9: mod_base = OTHER; note = 2'-O- methyl
  modified_base 10: mod_base = OTHER; note = 2'-O- methyl
  modified_base 11: mod_base = OTHER; note = 2'-O- methyl
  modified_base 12: mod_base = OTHER; note = 2'-O- methyl
  modified_base 13: mod_base = OTHER; note = 2'-O- methyl
  modified_base 14: mod_base = OTHER; note = 2'- fluoro
  modified_base 15: mod_base = OTHER; note = 2'-O- methyl
  modified_base 16: mod_base = OTHER; note = 2'- fluoro
  modified_base 17: mod_base = OTHER; note = 2'-O- methyl
  modified_base 18: mod_base = OTHER; note = 2'-O- methyl
  modified_base 19: mod_base = OTHER; note = 2'-O- methyl
  modified_base 20: mod_base = OTHER; note = 2'-O- methyl
  modified_base 21: mod_base = OTHER; note = 2'-O- methyl, 3'- thiophosphate
  modified_base 22: mod_base = OTHER; note = 2'-O- methyl, 3'- thiophosphate
  modified_base 23: mod_base = OTHER; note = 2'-O- methyl
tgtactctcattgtggatgacga

SEQ ID NO: 588 - RNA, 23 nt, synthetic construct
  source 1..23: mol_type = other RNA
  modified_base 1: mod_base = OTHER; note = 2'-O- methyl, 3'- thiophosphate, 5'-Ethenyl-(E)-phosphonate
  modified_base 2: mod_base = OTHER; note = 2'- fluoro, 3'- thiophosphate
  modified_base 3: mod_base = OTHER; note = 2'-O- methyl
  modified_base 4: mod_base = OTHER; note = 2'- fluoro
  modified_base 5: mod_base = OTHER; note = 2'- fluoro
  modified_base 6: mod_base = OTHER; note = 2'- fluoro
  modified_base 7: mod_base = OTHER; note = 2'-O- methyl
  modified_base 8: mod_base = OTHER; note = 2'-O- methyl
  modified_base 9: mod_base = OTHER; note = 2'-O- methyl
  modified_base 10: mod_base = OTHER; note = 2'-O- methyl
  modified_base 11: mod_base = OTHER; note = 2'-O- methyl
  modified_base 12: mod_base = OTHER; note = 2'-O- methyl
  modified_base 13: mod_base = OTHER; note = 2'-O- methyl
  modified_base 14: mod_base = OTHER; note = 2'- fluoro
  modified_base 15: mod_base = OTHER; note = 2'-O- methyl
  modified_base 16: mod_base = OTHER; note = 2'- fluoro
  modified_base 17: mod_base = OTHER; note = 2'-O- methyl
  modified_base 18: mod_base = OTHER; note = 2'-O- methyl
  modified_base 19: mod_base = OTHER; note = 2'-O- methyl
  modified_base 20: mod_base = OTHER; note = 2'-O- methyl
  modified_base 21: mod_base = OTHER; note = 2'-O- methyl, 3'- thiophosphate
  modified_base 22: mod_base = OTHER; note = 2'-O- methyl, 3'- thiophosphate
  modified_base 23: mod_base = OTHER; note = 2'-O- methyl
tagaggtgcactagttgtttcac

What is claimed is:

1. A double-stranded RNAi agent, comprising any one oligonucleotide duplex selected from the following pairings of a sense strand and an antisense strand:
(1) the sense strand has the sequence shown in SEQ ID NO: 11 or a fragment thereof, or a modified sequence of the sequence or the fragment thereof; and the antisense strand has the sequence shown in SEQ ID NO: 24 or a fragment thereof, or a modified sequence of the sequence or the fragment thereof,
(2) the sense strand has the sequence shown in SEQ ID NO: 4 or a fragment thereof, or a modified sequence of the sequence or the fragment thereof, and the antisense strand has the sequence shown in SEQ ID NO: 17 or a fragment thereof, or a modified sequence of the sequence or the fragment thereof,
(3) the sense strand has the sequence shown in SEQ ID NO: 3 or a fragment thereof, or a modified sequence of the sequence or the fragment thereof; and the antisense strand has the sequence shown in SEQ ID NO: 16 or a fragment thereof, or a modified sequence of the sequence or the fragment thereof,
(4) the sense strand has the sequence shown in SEQ ID NO: 12 or a fragment thereof, or a modified sequence of the sequence or the fragment thereof; and the antisense strand has the sequence shown in SEQ ID NO: 25 or a fragment thereof, or a modified sequence of the sequence or the fragment thereof,
(5) the sense strand has the sequence shown in SEQ ID NO: 6 or a fragment thereof, or a modified sequence of the sequence or the fragment thereof; and the antisense strand has the sequence shown in SEQ ID NO: 19 or a fragment thereof, or a modified sequence of the sequence or the fragment thereof,
(6) the sense strand has the sequence shown in SEQ ID NO: 10 or a fragment thereof, or a modified sequence of the sequence or the fragment thereof; and the antisense strand has the sequence shown in SEQ ID NO: 23 or a fragment thereof, or a modified sequence of the sequence or the fragment thereof,
(7) the sense strand has the sequence shown in SEQ ID NO: 1 or a fragment thereof, or a modified sequence of the sequence or the fragment thereof; and the antisense strand has the sequence shown in SEQ ID NO: 14 or a fragment thereof, or a modified sequence of the sequence or the fragment thereof,
(8) the sense strand has the sequence shown in SEQ ID NO: 2 or a fragment thereof, or a modified sequence of the sequence or the fragment thereof, and the antisense strand has the sequence shown in SEQ ID NO: 15 or a fragment thereof, or a modified sequence of the sequence or the fragment thereof,
(9) the sense strand has the sequence shown in SEQ ID NO: 5 or a fragment thereof, or a modified sequence of the sequence or the fragment thereof; and the antisense strand has the sequence shown in SEQ ID NO: 18 or a fragment thereof, or a modified sequence of the sequence or the fragment thereof,
(10) the sense strand has the sequence shown in SEQ ID NO: 7 or a fragment thereof, or a modified sequence of the sequence or the fragment thereof; and the antisense strand has the sequence shown in SEQ ID NO: 20 or a fragment thereof, or a modified sequence of the sequence or the fragment thereof,
(11) the sense strand has the sequence shown in SEQ ID NO: 8 or a fragment thereof, or a modified sequence of the sequence or the fragment thereof; and the antisense strand has the sequence shown in SEQ ID NO: 21 or a fragment thereof, or a modified sequence of the sequence or the fragment thereof,
(12) the sense strand has the sequence shown in SEQ ID NO: 9 or a fragment thereof, or a modified sequence of the sequence or the fragment thereof; and the antisense strand has the sequence shown in SEQ ID NO: 22 or a fragment thereof, or a modified sequence of the sequence or the fragment thereof,
(13) the sense strand has the sequence shown in SEQ ID NO: 13 or a fragment thereof, or a modified sequence of the sequence or the fragment thereof, and the antisense strand has the sequence shown in SEQ ID NO: 26 or a fragment thereof, or a modified sequence of the sequence or the fragment thereof.

2. The double-stranded RNAi agent according to claim 1, wherein the double-stranded RNAi agent satisfies any one of the following conditions:
(1) the nucleotide sequence of the sense strand differs from any one of the sequences of SEQ ID NOs: 1 to 13 by 1 to 3 nucleotides; and
(2) the nucleotide sequence of the antisense strand differs from any one of the sequences of SEQ ID NOs: 14 to 26 by 1 to 3 nucleotides.

3. The double-stranded RNAi agent according to claim 1, wherein the sense strand or the antisense strand comprises at least one modified nucleotide selected from a deoxy-nucleotide, a 2′-deoxy-thymidine (dT) nucleotide, a 2′-O-methyl modified nucleotide, a 2′-fluoro modified nucleotide, a 2′-deoxy-modified nucleotide, a locked nucleotide, an unlocked nucleotide, a conformationally restricted nucleotide, a constrained ethyl nucleotide, an abasic nucleotide, a 2′-amino-modified nucleotide, a 2′-O-allyl-modified nucleotide, a 2′-C-alkyl-modified nucleotide, a 2′-hydroxy-modified nucleotide, a 2′-methoxyethyl modified nucleotide, a 2′-O-alkyl-modified nucleotide, a morpholino nucleotide, a phosphoramidate, a nucleotide comprising a non-natural base, a tetrahydropyran modified nucleotide, a 1,5-anhydrohexitol modified nucleotide, a cyclohexenyl modified nucleotide, a nucleotide comprising a phosphorothioate group, a nucleotide comprising a methylphosphonate group, a nucleotide comprising a 5′-phosphate group, and a nucleotide comprising a 5′-phosphate mimic; and combinations thereof;
or, nucleotide monomers are linked by a 3′,5′-phosphodiester bond.

4. The double-stranded RNAi agent according to claim 1, wherein the double-stranded RNAi agent satisfies one or more of the following conditions:
(1) at least one strand comprises a 3′ overhang of at least 1 nucleotide or at least 2 nucleotide;
(2) the double-stranded RNAi agent has a duplex region of 15 to 30 nucleotide pairs in length, or a duplex region of 17 to 25 nucleotide pairs in length, or a duplex region of 19 to 23 nucleotide pairs in length, or a duplex region of 21 nucleotide pairs in length;
(3) each strand has 15 to 30 nucleotides, or 19 to 25 nucleotides;
(4) the sense strand has 21 nucleotides and the antisense strand has 23 nucleotides;
(5) all nucleotide modifications on the sense and antisense strands are chemical modifications at the 2′ position of the nucleotide ribose; and
(6) the 3′,5′-phosphodiester bond between nucleotide monomers is phosphorothioate-modified.

5. The double-stranded RNAi agent according to claim 4, wherein the double-stranded RNAi agent satisfies one or more of the following conditions:
(1) the chemical modification at the 2′ position of the nucleotide ribose is selected from any one of 2′-O-methyl, 2′-methoxyethyl, 2′-fluoro, 2′-benzyloxy, 2′-methylcarbonylamino, and 2′-pyridinylmethoxy, or a combination thereof;
(2) the chemical modification at the 2′ position of each nucleotide ribose is selected from a combination of 2′-O-methyl and 2′-fluoro;
(3) the chemical modification at the 2′ position of each nucleotide ribose is selected from an alternating combination of 2′-O-methyl and 2′-fluoro; and
(4) the chemical modification at the 2′ position of each nucleotide ribose is as follows: on the antisense strand, all odd-numbered positions are modified with 2′-O-methyl, and all even-numbered positions are modified with 2′-fluoro; on the sense strand, positions corresponding to 2′-O-methyl modifications on the antisense strand are modified with 2′-fluoro, and positions corresponding to 2′-fluoro modifications on the antisense strand are modified with 2′-O-methyl.

6. The double-stranded RNAi agent according to claim 1, further comprising the following modifications:
(1) the antisense strand is modified according to one of the modification patterns shown in Table 42;
the sense strand is modified according to one of the modification patterns shown in Table 43;
wherein the antisense strand is modified according to modification pattern A, and the sense strand is modified according to modification pattern a;
wherein the antisense strand is modified according to modification pattern B, and the sense strand is modified according to modification pattern a;
wherein the antisense strand is modified according to modification pattern C, and the sense strand is modified according to modification pattern a;
wherein the antisense strand is modified according to modification pattern B, and the sense strand is modified according to modification pattern b;
wherein the antisense strand is modified according to modification pattern C, and the sense strand is modified according to modification pattern b;
wherein the antisense strand is modified according to modification pattern D, and the sense strand is modified according to modification pattern b;
wherein the antisense strand is modified according to modification pattern E, and the sense strand is modified according to modification pattern b; or
wherein the antisense strand is modified according to modification pattern F, and the sense strand is modified according to modification pattern b; or
(2) the antisense strand is modified according to one of the modification patterns shown in Table 44;
the sense strand is modified according to one of the modification patterns shown in Table 45;
wherein the antisense strand is modified according to modification pattern A, and the sense strand is modified according to modification pattern a;
wherein the antisense strand is modified according to modification pattern B, and the sense strand is modified according to modification pattern a;
wherein the antisense strand is modified according to modification pattern C, and the sense strand is modified according to modification pattern a;
wherein the antisense strand is modified according to modification pattern B, and the sense strand is modified according to modification pattern b;
wherein the antisense strand is modified according to modification pattern C, and the sense strand is modified according to modification pattern b;
wherein the antisense strand is modified according to modification pattern D, and the sense strand is modified according to modification pattern b;
wherein the antisense strand is modified according to modification pattern E, and the sense strand is modified according to modification pattern b; or
wherein the antisense strand is modified according to modification pattern F, and the sense strand is modified according to modification pattern b.

7. The double-stranded RNAi agent according to claim 1, wherein the double-stranded RNAi agent satisfies one or more of the following conditions:
(1) the nucleotides at positions 2 to 8 from the 5′ end of the antisense strand are modified with a modification group, wherein the modification group is selected from UNA, GNA, and DNA, wherein the structures of UNA and GNA are as follows: [chemical structure]
wherein the base is selected from adenine, guanine, cytosine, thymine, and uracil;
(2) the 5′-carbon atom of the 5′-terminal nucleotide glycoside of a modified antisense strand is phosphorylated, and the phosphorylation of the 5′-carbon atom is selected from the following 5′-phosphorylation groups: 5′-vinylphosphonate group (5′-E-VP), 5′-methylphosphonate group (5′-MP), 5′-C-methylphosphonate group, 5′-phosphorothioate group (5′-PS), and 5′-phosphate group (5′-P), the structures of which are shown below, respectively: [chemical structure]
wherein R is hydrogen, hydroxyl, amino, C₁₋₄ alkyl, aryl, C₁₋₄ alkoxy, C₁₋₄ alkylcarbonylamino, or halogen; and
the base is selected from adenine, guanine, cytosine, thymine, and uracil; and
(3) the 3′,5′-phosphodiester bond between nucleotides at the terminus of the sequence is phosphorothioate-modified to form a chirally pure 3′,5′-phosphorothioate bond, wherein the 5′ ends of both the sense and antisense strands contain 1 to 3 phosphorothioate linkages, and the 3′ end of the antisense strand contains 1 to 3 phosphorothioate linkages.

8. The double-stranded RNAi agent according to claim 1, wherein the double-stranded RNAi agent comprises any one oligonucleotide duplex selected from the following pairings of a sense strand and an antisense strand:
(1) the sense strand has the sequence shown in SEQ ID NO: 209; the antisense strand has the sequence shown in SEQ ID NO: 222;
(2) the sense strand has the sequence shown in SEQ ID NO: 202; the antisense strand has the sequence shown in SEQ ID NO: 215;
(3) the sense strand has the sequence shown in SEQ ID NO: 201; the antisense strand has the sequence shown in SEQ ID NO: 214;
(4) the sense strand has the sequence shown in SEQ ID NO: 210; the antisense strand has the sequence shown in SEQ ID NO: 223;
(5) the sense strand has the sequence shown in SEQ ID NO: 204; the antisense strand has the sequence shown in SEQ ID NO: 217;
(6) the sense strand has the sequence shown in SEQ ID NO: 208; the antisense strand has the sequence shown in SEQ ID NO: 221;
(7) the sense strand has the sequence shown in SEQ ID NO: 199; the antisense strand has the sequence shown in SEQ ID NO: 212;
(8) the sense strand has the sequence shown in SEQ ID NO: 200; the antisense strand has the sequence shown in SEQ ID NO: 213;
(9) the sense strand has the sequence shown in SEQ ID NO: 203; the antisense strand has the sequence shown in SEQ ID NO: 216;
(10) the sense strand has the sequence shown in SEQ ID NO: 205; the antisense strand has the sequence shown in SEQ ID NO: 218;
(11) the sense strand has the sequence shown in SEQ ID NO: 206; the antisense strand has the sequence shown in SEQ ID NO: 219;
(12) the sense strand has the sequence shown in SEQ ID NO: 207; the antisense strand has the sequence shown in SEQ ID NO: 220;
(13) the sense strand has the sequence shown in SEQ ID NO: 211; the antisense strand has the sequence shown in SEQ ID NO: 224.

9. A conjugate for reducing the expression of AGT, comprising the double-stranded RNAi agent according to claim 1 and a ligand conjugated thereto.

10. The conjugate according to claim 9, wherein the conjugate satisfies one or more of the following conditions:
(1) the ligand is conjugated to the 3′ end or the 5′ end of the sense strand of the oligonucleotide;
(2) the ligand is a GalNAc derivative attached via a bivalent or trivalent branched linker;
(3) the ligand is as follows: [chemical structure]
wherein X is hydrogen, a hydroxyl protecting group, or H, the hydroxyl protecting group being selected from acetyl, benzoyl, and isobutyryl; Y is an amino protecting group or H, the amino protecting group being selected from formyl, acetyl, propionyl, n-butyryl, and isobutyryl; n is an integer from 0 to 20; q, r, and s are independently integers from 1 to 7; and
(4) the ligand is as follows: [chemical structure]
wherein X is oxygen, nitrogen, or sulfur;
Y is alkyl or aryl;
R₁ is oxygen or sulfur;
R₂ is hydrogen, amino, C₁₋₄ alkyl, aryl, C₁₋₄ alkoxy, or halogen;
A is —(CH₂)ₐ—, —(CH₂CH₂O)_{b}—, —((CH₂)_{c}NHCO)_{d}—, or —((CH₂)_{c}CONH)_{d}—, wherein a is an integer from 1 to 15, b is an integer from 1 to 7, c is an integer from 1 to 7, and d is an integer from 1 to 5;
B is —(CH₂)ₑ—, wherein e is an integer from 0 to 7;
L is —CONH— or —NHCO—;
X₁ is —(CH₂)_{f}— or —(CH₂CH₂O)ₜCH₂—, wherein f is an integer from 1 to 5;
X₂ is —(CH₂)_{g}—, wherein g is an integer from 1 to 6;
Y₁ is 0 or 1;
Y₂ is 0, 1, or 2;
Y₃ is 1, 2, or 3;
m is an integer from 0 to 4;
n is an integer from 0 to 4.

11. The conjugate according to claim 9, wherein the conjugate satisfies one or more of the following conditions:
(1) the ligand is as follows: [chemical structure]
(2) the ligand is G4, G5, G6, or G7, with a structure as shown below: [chemical structure]
(3) the conjugate has a structure as shown below:

[chemical structure]

[chemical structure]

12. The conjugate according to claim 9, wherein the double-stranded RNAi agent comprises any one oligonucleotide duplex selected from the following pairings of a sense strand and an antisense strand:
(1) the sense strand has the sequence shown in SEQ ID NO: 423; and the antisense strand has the sequence shown in SEQ ID NO: 488;
(2) the sense strand has the sequence shown in SEQ ID NO: 406; and the antisense strand has the sequence shown in SEQ ID NO: 453;
(3) the sense strand has the sequence shown in SEQ ID NO: 404; and the antisense strand has the sequence shown in SEQ ID NO: 450;
(4) the sense strand has the sequence shown in SEQ ID NO: 426; and the antisense strand has the sequence shown in SEQ ID NO: 492;
(5) the sense strand has the sequence shown in SEQ ID NO: 412; and the antisense strand has the sequence shown in SEQ ID NO: 465;
(6) the sense strand has the sequence shown in SEQ ID NO: 412; and the antisense strand has the sequence shown in SEQ ID NO: 468;
(7) the sense strand has the sequence shown in SEQ ID NO: 421; and the antisense strand has the sequence shown in SEQ ID NO: 483;
(8) the sense strand has the sequence shown in SEQ ID NO: 417; and the antisense strand has the sequence shown in SEQ ID NO: 476;
(9) the sense strand has the sequence shown in SEQ ID NO: 419; and the antisense strand has the sequence shown in SEQ ID NO: 479;
(10) the sense strand has the sequence shown in SEQ ID NO: 401; and the antisense strand has the sequence shown in SEQ ID NO: 443;
(11) the sense strand has the sequence shown in SEQ ID NO: 398; and the antisense strand has the sequence shown in SEQ ID NO: 433;
(12) the sense strand has the sequence shown in SEQ ID NO: 429; and the antisense strand has the sequence shown in SEQ ID NO: 496;
(13) the sense strand has the sequence shown in SEQ ID NO: 414; and the antisense strand has the sequence shown in SEQ ID NO: 471;
wherein the oligonucleotide duplex is conjugated with ligand G5;
or, the double-stranded RNAi agent comprises any one oligonucleotide duplex selected from the following pairings of a sense strand and an antisense strand:
(14) the sense strand has the sequence shown in SEQ ID NO: 554; and the antisense strand has the sequence shown in SEQ ID NO: 488;
(15) the sense strand has the sequence shown in SEQ ID NO: 530; and the antisense strand has the sequence shown in SEQ ID NO: 457;
(16) the sense strand has the sequence shown in SEQ ID NO: 531; and the antisense strand has the sequence shown in SEQ ID NO: 570;
(17) the sense strand has the sequence shown in SEQ ID NO: 541; and the antisense strand has the sequence shown in SEQ ID NO: 450;
(18) the sense strand has the sequence shown in SEQ ID NO: 557; and the antisense strand has the sequence shown in SEQ ID NO: 492;
(19) the sense strand has the sequence shown in SEQ ID NO: 533; and the antisense strand has the sequence shown in SEQ ID NO: 465;
(20) the sense strand has the sequence shown in SEQ ID NO: 560; and the antisense strand has the sequence shown in SEQ ID NO: 483;
wherein the oligonucleotide duplex is conjugated with ligand G5.

13. The conjugate according to claim 9, wherein the double-stranded RNAi agent comprises an oligonucleotide duplex formed by pairing of the sense strand shown in SEQ ID NO: 423 and the antisense strand shown in SEQ ID NO: 488, and the oligonucleotide duplex is conjugated with ligand G5.

14. A nucleic acid-protein composition, comprising a duplex region of the double-stranded RNAi agent according to claim 1, and a nuclease;
or, the nucleic acid-protein composition comprises an antisense strand of the duplex region of the double-stranded RNAi agent, and a nuclease.

15. The nucleic acid-protein composition according to claim 14, wherein the nuclease is an AGO protein.

16. A pharmaceutical composition, comprising the double-stranded RNAi agent according to claim 1, and a pharmaceutically acceptable carrier.

17. A pharmaceutical composition, comprising the conjugate according to claim 9, and a pharmaceutically acceptable carrier.

18. A method for treating a disease associated with AGT gene expression or treating hypertension and cardiovascular and cerebrovascular diseases, comprising administering an effective amount of the double-stranded RNAi agent according to claim 1 to a subject in need thereof.

19. A method for treating a disease associated with AGT gene expression or treating hypertension and cardiovascular and cerebrovascular diseases, comprising administering an effective amount of the conjugate according to claim 9 to a subject in need thereof.

20. A method for treating a disease associated with AGT gene expression or treating hypertension and cardiovascular and cerebrovascular diseases, comprising administering an effective amount of the pharmaceutical composition according to claim 16 to a subject in need thereof.
